United States Patent Application Publication US 2025/0195589 A1 - sequence listing, part 5

SEQ ID NO: 9 - DNA, 2410430 bp, Lactobacillus crispatus
  source 1..2410430: mol_type = genomic DNA
ttgttcgacattaataaattttgggaacactttaatgacgagatgcgtgctcgtttcaacgaagttgcctacaatgcatggttcaaaaatactaaacctatttcatataatggaaaaacacatgaattaaaaattttagttcaaaatcctgtttctaaaggttactgggaaaagaatctatcttctcaattgattcaatctgcctacggttatgccgacatcgagatcttacctgtatttaaaatatctgaagatgcggatattacagaaaggatcgtaacacctgcgccaaagcgtgaagcgcaagttcaacagcctaatttgccagaaaaagaattcactaaagacttgaagttaaacgaaaaatacacttttgataacttcgttcaaggtgagggaaacaagttggccgccggtgctgcacttgctgtagccgacagtcctggtagtttttacaatcctttatttatttttggtggcgttggtttaggtaaaacacacctgatgcaagctgttgggcatcaaatgctagcagagcgacctaacgcaaaagttgtctatatacagagtgaaacttttgttaatgacttcattaattccatcaaaaataaaacgcaggacaaattccgcgaaaaatacagaacttgtgacctgcttttagttgatgatattcaattttttgcaaaaaaagaggggattcaagaggaattcttccatacttttgagacactttataacgatcaaaaacagatcgtaatgactagcgatcggttgcctacagaaatcccagatctatcagagcgtttagtttctcgatttacatggggcttgcaagtcgaaattacgcctcccgatttggaaaccagaatcgctattttgcgacgcaaagctgaaacagaaggttggactatcgatgatggtacgcttaactatattgcatctcaagttgatactaatattagagaacttgaaggggctttagttaaagttcaagcttatgccacaattgaaaaagcagatattgacgttaaccttgcgcgtgaagcattagttgacctcaaattagttcaaaaaaatcgtggattacaaatctctaaaatacaggaggttgtcgcaaactatttccaaacttcaactgctgaattaaagggtaaaaagcgtgtacggcagattgtagttcctcggcaaatagcaatgtatctttctcgtgaattaacagatgccagtttgccaaaaattggtcaagaatttgggggaaaagatcataccactgtcatgcatgcttatgataaaatcgacaagcagatgaaacttgattctgatatcaaaactgctgtctttgacctaaagcaaattttggagcactaaaagttatccactgtggaaaaataaacaagttttacacaagtttttaaccgtaacaagtccgttattttaggcttcttatgagttttcaacagaactcacaggccctactactactaattaattatataattactaataaagagaaatcacacagctattcttgggaggaaaaacatgaagtttacaattaatcgcaatctgtttatcgaaaacctcaataatgtaatgcgggccatctcatcaagagctactattccaattcttagtggaattaagttagacttaacagaagataaacttacgctaaccggtagtgatacagatatttcaattgaaattcaaattccagtcaatgatgatttaaatgtggaatctacaggttctattgttttaccagctagattctttagtgaaatcgtaaaaaaattgcctggtaaagacttctcatttgaagtaaaagaaagttttcaaactcagatcatatctgaaaatagtgaatttacaattaatggtttagatgctaataactatccacgtttaccagaaatttcagatgctgcttcattcactatttctggtaaaactttccgtgaaatcattaatgaaacgcaatttgctacttccaatgatcaaacacgagcaattttaactggggtacgtttcttctttagtccagataaaattaaagctgtcgcaactgattcccaccgtttatctcaaagaacaattgctttagaaaacggacctcaagctgaaactgatttgattattcctggtaaaagtttgcaggaattagctagaatcattggtgaagctgatccagaagttaaagtttgcccaggtgataaccaagctttatttgtaattggcaacttgtccttctattcacgtcttttggacggaaattatccagacactgatcgcttgattccgactgaaaagaccactagtgttgaatttgacatttccgaattatctagtgcccttgaacgtgccagtttgttaactcatgctggccgtaacaacgtggttactttgactttagatgtagaaaatcaatcagctaagttatcaggtaaatctgcggaaattggtaatgttgaagaagatgttagcttcagaaatcttgaaggaaacaatttagagatttccttcaaccctgactatatgcgtgatgcgttaagagcttcagtaacagattctgtaattatgagttttactaagccacttcgtccatttatcattaatccagataaagaagacattgaatttgtgcaattaattacgccagttagaacatattaatcaagtacacaatatttaggtcataaaaagtcgtcaaataaggcgactttttattttgcttttaaacgaaaacgcaaaatattggcgtatatttatttttttaccgtgctagtgtgattaggttattttgaaaaaaagctctgaaaaggcttataagagcgatttagtttgttatttgtgttgaaaactaatataattatataggtataaagcgtattgaaggtgagcattattaagtattttaaagttgacggcgatcatattactttggggcaattcctgaaggaagagagcattatttcatcaggtggacaagctaaatggtacttaaaagataatccagtaactttaaatggtgaacttgaagatcgaagaggcaaaaagatgcatgttggtgatcatatagtggttaatggccaagaatatgagtttcggtagggaagtcaatgtatcttgatcattttactgtacagaattttcgtaatttaaaaaagcttgacgtaaattttgattcaaacgtcaatatttttattggcaaaaatgctcagggcaagaccaatttgctagaggcaatctattttttagcattaacacgttcacataggaccaataatgataaagatttaattggtttcggcggtgagtttaccaatttacttgggcatgtacataaaagccaggtggatcttgatttacgtgttttgatcacccaaaaaggtaaaaaagtatggattaatcgagttgagcaggcgaagttgtctaaatacgtaggtcagctgaatgcgattttattttcaccggaagacctcgagttgatcaagggtgcaccagcactgcggcggagatttatggatcaagaatttggtcaaataaatgcagagtatttatacttcgcaagtaagtatcggcaagttttaattcaaaagaataattatctgaagcagctagctaaaggtaaggcaaaggatcaggtctttttagatgtactttcagatcaactagctggtatcgccgctgaagttgtctttcgacgatttaaatttcttaagtatcttagtcactatgctagcgatgcttatgcacatattagtttaggcagtgagcagctttcaattgcttatcatccatcagtggctgacatccaagctgatgacagtacagaagaaatttatcaaaagattttagcaagttatgcacgaaataaggcaagtgaaattcgcaaggggacaactacttctgggccgcaccgtgatgatattgaatttaaacttgatggtcaaaatgcacatctttatgcttcgcaagggcagcagcgttcaattgcacttagcgtcaagctggcggaaattcaattggtgcatcaactaacagatgagtatcctttactcttgctggatgatgtaatgagcgagttagatcatggtcgacaaagtgcgctacttaattatattcatgggaaaacgcaaacctttattactacgactgacttagaggggatttcctgggaaataattaaaaagccgcgtgtgtatcacattcaatcaggcaaaattagtttggagaaggagaattaaatggctgataattcaaaagaaaatcttgaaaaggtcaaaaaatatgaaaaagaggctgacaagtataatgccagtcaaattcaggttcttggcggtctagaagctgtacgtaagcggccaggtatgtatatcggttcgactagttctcagggattgcaccacttagtgtgggaaattattgataacagtattgatgaacgacttgctggttttgcgaccaagattgaagttacgactaacgaagatggtagtgtcaccgttcaagatgatggacgtgggattcctgtagatattcaagaaaaaacaggtcgtcctgcattagagactgtatttactgtacttcacgccggtggtaaattcggcggtggtggatataaggtttctggtggtttgcacggagttggggcttcagtagttaacgctctgtccactaaacttgatgttaccgtaatgcgtgatggcaaaaagtactttatcgatttcgatcatggccgtgttaaggatgagatgaaacaaattggcacggttccacttgatgaacatgggacgattgttcacttctatccagatccagatattttcacagaaactattgtttttgatgacaagatcttgaagaacagaatccgtgaattggcctttttgaacaagggattaactttaacctttactgacaagcgtaaagacactgccgaaacagatgtgtataagtttgaaggtgggattaaggaatacgttgcctttttgaacaagggacaagaagtattatttgatgatccaatttatgttgaaagcacctataatggcattgatgttgaagtggctttgcaatatacaaatggctataagactactttgatgacttttgccaataatattcacacctatgaaggtgggatgcacgaggccggttttaagactgcgttaacacgtgtggttaatgactatgcacataagtctaagatcttgaaagataaggacgataatctttccggtgaagacattcgtgaaggaatgacagctattgtctcagttaagcaccctagtccgcaatttgaaggtcagactaagaccaagttaggtaattcggatgctagaactgctgtagataaggctttttcagaaacctttagtcgtttcttgatggaaaatccttcagttgggcgcaagatcgtagaaaagggtcaattagccgaacgagctagaactgctgccaagcgtgcacgtgaagtaacaagaaagaaatctggtctggaaattgctaatttaccaggtaagttagccgacaatacaagtaacgatccaagtatttcagaactgtttatcgtcgagggtaactcagccggcggttctgctaagcaaggtagatcacgtttaacacaggctattttgccaatcagaggtaagattttaaatgttgaaaaagcttcgatggatcgaatcttggctaaccaagaaattagatctttattcacagctttaggaacaggctttggtgctgactttgacgtttcaaaagcacgttatcacaaattgattatcatgactgatgccgatgtcgatggtgcccacattagaaccttgctgttgaccttgttctataactatatgcgcccaatgatcgacaagggctatgtttatatcgccaagccacctctataccaagttcgtcaggggaaagtggtcagatatcttgatactgacgaagaattgcatgattacttaggtagcttgcaaccaagtcccaagcctactgtgcaacgttacaaggggttaggtgaaatggacccagagcagttgtgggaaactactatgaatccagaaaatagaagactggatcgggtaagtcctgagtatgctaaagatgctgacgcagtctttgagctcttaatgggaaatgaagtttcaccaagacgtgactttattcaaaagaatgctaaatatgttgaaaacttggatgcataggaggattagatggacgagaatcaaactcaagatcatagaattaaaaacgtcgatctaactagcatgatgcgtagttcatttttggattacgcaatgtcagttattgttgcacgtgctttacctgatgttcgtgatggcttaaagcccgtacaacgtcgtattctttacggtatgagcgagttgggggtaacgcctgataaaccatacaagaagagtgccagaattgttggggaagttatgggtaagtttcacccccatggtgattcctcaatctatcttgctatggcacacatggcacaagatttctcataccgttacatgttagtcgatggtcacggtaacttcggttctgtcgatggtgatgagccagccgcaatgcgttataccgaagcaagaatgagtaaaattgctgtggaaatgttgcgcgatatcaacaaaaacaccattgattggcaaagaaactatgatgataccgaaaatgaaccggttgtcttacctgctagaattcctaacttgcttgttaacggtgctaacgggattgccgttgggatgacaacaaatatcccgccacataacttgactgaagttattagtggtttgcacatgttaatgaaaaatcctgatgctacaaccaaggacttgatgaaagttatcccaggtcccgattttccaactggcggaattattatgggacgtggtggtatctaccgtgcttatgagagtggtaagggtaacattgttgttcgcgccaaaaccaatattgagactgaaaagagcggccgcgagcgcataattgtgagcgaaattccatttatggtaaacaaggctgaattggtgaagaaaattgctgatttggctcgagaaaagactatcgatggaattactggtgtgcgtgatgaatcagaccagacagggatgcggattaccattgatattcgccgtgatgctagtgctagcgttgttttgaataatttattcaagcaaactcaaatgcaggctaactttggtatgaatatggtggctattgttgatggtgcgccacactttttaaccttgaagcaaatgctgcaatattacttggatcaccaagaagatgttgtaactcgcagaacaagattcgagttagctaaggcagaggcaagagcccacatccttgaagggttaagaatcgctctggacaatattgatgaaattgtccacattatccgcaatagtcaatcaagtgacattgctaaagcaactttgattagccgctttggccttgatgataagcaatctcaggctatcttagacatgcgtttggttcgcttgactggcttggagcgcgataaggtagaagctgaatacaaggaattacaagctaaaattgctgactacaaagatattttgtctaagcctgagagaattgaccaaattatctatgacgaattgcttgatattcaaaaacgattcggtgataagcgaagaaccgaaattggtgctagcgaagtcgtttcaattgaagatgaagatttgattgaaaagcaaaatattctgttgacggttacccataacggctatattaagagaatgccaattcaggaatttaagactcaaaaccgtggtggtaaaggtatcaagggaatgggtgtacaagatggcgactttattgagcatttgatttactcaagtacgcacgatctgctcttgttctttactaatgctggtaaggtttactccaagaaagcctatgagattcctgaatacggccgcgcagctaaaggattgccagtagtcaacttattgcaattggaaaagggcgaaaaggtccaaactgtaattaatattccggaaggtgctgacgataattacttattctttgttactaagatgggaactgtaaagcgtacacacgttagcgaattttctaatattagaaacagtggtttaattgccttaactttgaaagatggcgatgaattaagcaatgttttgactactgatggtaagcaaaacatcttaatcgggactcacttgggctacgctgttaccttcaatgaaggcgatgttcgggcaatgggtcgaactgctgctggtgttcgcggaattaacttgcgtgagcatgactatgttgttggttcaggtattttaggtgctgatgaccaagtcttggtaatttctgaaaagggttatggtaaacggactccagcttcagaatatccagttaaaggccgtggcggtaaaggtattaagactgccaatattactgagaagaatggtccattagctggtgtaacaatcattaactcaaataatgatgtgatggtaattactactgacggaattatgattcggtttagaattgatgatgtttcgcaaactggccgtagcaccatgggtgttcgcttgattaaagttagcgatgatagtcaggttgcaagtttaaccgttgttccaactgaggaagaacaagatcaaactggtgacgatgacgactcaaaaaatggataattaattaaaaaaacaaaaaatttgaacttttaaaaaaattatcaaacttttttgcgtaataaataatgagcagtaaaaaatctgctaggatcacgtgaaaacagtttggtaattttttatttatatgctaaaattagaaattgcgagtaatattccattactccttgttcttgattttagcaagaaccatatagtccagaaggaggtgcaatagtcatggcaactacaaagtacgaagtaacttacatcatcaagccagatgttgacgaagacaacaagaaggcagttgtagaaaactacgacaaggttatcgctgataacggtggtactatggtagaatccaaagactggggcaagcgtcgtttcgcatatgaaattgataagtatcgtgaaggtacttaccacattatgactttcactgctgacaacgctgacgcagttaacgaatttagccgtttgtcaaagattgacaacgctatcttacgttcaatgaccgttaagttagataagtaattttaatttattatccgttatgtgatttaggaaaggaaggtacatgagtatgattaatagagttgtacttgttggccgtttaacacgtgatcctgaattacgtactactgggagtggaatctcggttgctacgtttactcttgctgttgaccgtcaatttacaaatagccaaggtgagagaggcgcagatttcgtcagctgtgtaatttggagaaagtcagcagaaaacttctgcaactttacttcaaagggttcattagttggaattgatggccgaattcaaaccagaagttatgataataaagatgggcaaagggtatatgtaaccgaagttgttgttgataacttcgcattgctcgaatcacgcaaggatcgtgaagcccgcggtcaaaatggtggttatacaccaaatagtggaaatgctggcagtcaacctgctaacaatttcccaaataatggcggatcacaaggtaattcacagactaataacaatcaaaataattcacaagatccatttagtggctcaggtgatacgattgatatttctgatgacgatctaccattttaaactaaattaaagaaaggattctagaacatggctcaacaaagaagaggcggccgtcgtcgtcgtaaggttgactacatcgcagctaaccacatcgactacgttgactacaaggatgtcgatctgttgaaacgttttatctcagaaagaggtaagattttaccacgtcgtgttactggcactagtgctaagaaccaacgtaaagtagctaatgcaattaagagagctcgtatcatgggcttgttaccattcgttgctgaagactaatttagatcgaaataaaccaaaaggacaggacacaaggttctgtccttttttcgtataataattaaaaaaattctctcttcgtattgtaccctaagtgtataattttttacggtaagttgaataaataattaaaaaagcccaagtcctttgaatttggacttgagctcaaacaaaaagaccagtagtctgatgttaagaacaaaaaacacattagaagctggtcttttatgaattcaattgtaactgaaatcgcaaatattataaagtctgaagataattatattaagcgtgaaagaaaaataatctgtttcttcttaaacctgattaaggaaatcatggccttggctttagctaaagttgatgatgaaatgattaccaaggttaaagcacagggatatcagattgataagaagaatgagcgctcaatcaatatggcttttggcgaagttaggtatgtcagaagaagatatgtctgcccaggcaaacaagcaaggtatcccttggatgaattaataggctttgacaaatacaagcgctacagtattttagcagtcaaaaacatcttagaagtaagcagcgttgccacttatcgcaatactgctctagcagtcaattgcctgtctggctttaatattagccatatgcaggtgggcaatttggtaaaaatggccgggaaaaatattaaagcgggccaagaagcagattcaagatatgatgccgcaggcactaagaaaaaggtcccagttttgtatcttgaaggcgatggcgtggtgatcaaaggcactaaaagccggttggaatttcatcgctatcaggtctgtgaaggcattgtcaatataagcaagaaacgcagaaagcgaatcaatgccaaggaatttgtttctttaagccgacttgatgcgctgaacgaagccaaggagtacctggccaatacttatgatctttctgatactgtaattcttagcaacgccgatggcggtgctggatatgtcaaaacagacttcgatgacattgtagggctatgcaagcgtcatgagcatttcttggatgtctttcacctaaataagaaaatcaaagaaaggctatattttgcgcctgacctgcaaggcaagctgatttctgctttggaatacaaatacagctatgacaaaactatcctaaccactgcagaaagccgactaattgatgaattgaataccgagctcaatcatgattatctggggcgcctaaagaattatattgatcgtcattgggacgatattaagccgtttaagaaacgaaaactgactgtgactaaagccattggctgctgcgagagcaaccaccgcaagtatacctaccgtgttaaggggcaaggcaagaaatggtcaaaatctggagcagaaggcatgcttaggatcttaagctgcatcaagaatcgagagctggaattttggcttagcagcgagtttgaagattcagaaataactgtattgactgaacaggaattaaaagcagcggcccgtgacagcttaaagaagcgtcatgaagttcatttaggcatccagcatggcgcattaaccgcacaggtagctggcaatagttatttaagcaagctaagcagaaatttaagtcatataaatatttaagaaattaaggttagactaatggtttaaaggctaccgcaaaaacattgacacttactattgtacctactgttttcaatcatgagccggaataaggtataattaacactgatatactatatctattaggaaggatcttcatgaaggattttttacgtaagctagaattgcctgaatttattaaggattcacggctgacagcttctataatcattgcactttctctttcattattgggaagcattattgcgatgattatgaatccattgtttggtttggcaatgcttttagtctttattttgaccgttgcctttgccatctatgggacctatattttagcgggtaatgcaaatagctttgcggttaatttgtcttaccggataaagcgtagtgaacaagaagcaatgattaagatgccgttgggaattttgctttatgattcggatcaccaaattcagtgggttaatccatatctgcaattatatttaaagagtacagatttagtggggcacacaattgaatcagttgaccctgatctgaataagctacttaatgaagcaattgaggcaaaaacagcagaaaatcatctggttgattgggatggtcaccgatttgaaatggtggtccaaaataatttaggcgtaatatatttattggatattacgcgctatgccaaaattgaagataaatataaagctgaacgattggcgattggtcaaattttcatcgataattatgatgagctaagtgaagcaatgcatgatcaagaattgaccagcatgagttcatatgtgcaaaatacattgagtgattatgcgaaaaagtttaacgcatatttaaaacggattgatgaagaccatttcttgatcttgatccatatgcaagaattagctgagatggagaaggacaaattctctgttttagataaggtgcgtcaagaaacgagtagaaacaatacgccacttactttatctatgggaattgcttttgggagtgattctttgtctgaaattgccaaccaggctcaatctaacttggattttgccctaggtcgaggtggagaccaggttgtcttacgtcaacccggtaaagacgcccgcttttatggcggtaagtctaatccgatggaaaagcggactagagttagagcaagaatggtttcacaagcaattagtgaactatttaaagatgccgatcaagtttttgttgttggtcatcagcgtcctgacatggattcagtcggtagtgggattggcgtagtaaaattagctcgtcttcacggagttaaagctaattttgttttagatactaataagacaaactatgatgttggtcgcttggtcaccttaatgcaacagaaaaatcaggataaggatatttttattaaccctgatgtagctttagctcaagttactgacaagtcaatgttggtaatggttgatcattcgaagtattcaattacttactcacgggcactttatgatcgtttgaagaatcgaatcatcgttattgatcaccatagacgaggcgaggaattccctgaaaatccaatgttaacctatgttgaaccatatgcttcttcggcttgtgaattggtcactgaaatgattgaatatcagcagccagctaacggtaagcgagttttgaccgatattgaagctacagcaatgttagctgggattgtggtcgactccaaggaattctcgttgagaacaggaactagaaccttcgatgcggctagctacttacgttcaatcggggctgactcagcagttgtaagcatgctcttgaaagaggatattgatagtttcctcgaacggacgcatttagtagccactttgaagatggtgaagccacatatggccgtattatgtggacctgatgataagattatagatccgatcattacagcgcaggcggctgatactgcacttgatttgggaaatgtgggtgctagtttcgcaattacgcggcgcagtgataatacgattggtatttcagctagatcaatgggtaagatcaacgttcaaattattatggaaaaattgggcggtggtggacatctttctaatgcggcaacacagattaaagatgttactattgaagaagcaaaacaaaaattacttgatgcaattgatgaatatgaaaaagaaaatgattagggaggacaaatatgaaagttatttttactcaagatgttagaggtcgaggtaagcgtggacaagttaaggacgtacctgatggctacgcacaaaattacttgattaagcgaggcttggctaaagaagctactaaaggtaacatgaataccttgaagcgtgtagaagctaatgaaaaggctgcttatgaagcagaaaaggccgaagcagaaaagatcaaggcagaacttgaaaaagacgataccgttgttaacttcaaatctaaggctggtactgactcacgtttgtttggttcaatctcaagtaagaagattgtggaaggccttgaaaagcaatacggtatcaaggttgataaacgcaagcttaacttgccagaaccaattaagactttgggctatactaatgttcatgccaaattatttaagggtgttgaagctactattcgcgttcacgttactgaacaagactaataaaaagtggttgtgattgatggataatatcgtttctcaacaaattccgcatgatcgcgatgccgaaagggcagttctgggtgcgatttttatcgatcctgaagcaattgcggatgctagtgcggtagttcagcctgaagatttctatgagcgggctaatcaaattgtctttcaagcgatgttggacttgtctgatcgcggggatgcaattgatacgctgaccttacaggatgaattaaataaaagaaatcagttagaagatattggtggtatcggttatgtttctgaattagcgatggccacaccgacagcagcgcatgttacctattatgccaaaattgtgcataggaaggcgctgcttcgtcgtttaatctctgctagtcagaagattatctctaatgcaatcgatggctctgacgatgtaacagacattctagatgacgctgaaagtgaaattatgaatgtttcgtcagagaatagcacaggcggctttaggaccattaaagagatcgttaattcagcgattaatgatattaataatattccggatgacggaaatatggttactggcttgccgactggttttgcggaattagataagatgacaactggttttcacgatgatgaattgatcattgtagctgctcgtcctggtgtgggtaagacttcatttgccttaaatattgcgcaaaatgtagggctacacactgaaaaaagtgtagctatgttctcactagaaatgagtggagagcaactggttcagaggatgttagcttctgaaggactgattaattcacagcacttgagaactggccagcttgatgaagaagaatggcgtaaattggtagtggcttctgggtcactagcaggtgcgcaaatctttatcgatgatacgcccggaatcaagatgagtgaaattcgtgctaaatcacggcgattagctaaggaaaagggcaatcttggtcttattgtaattgactacttgcagttgattgagggaccacgtagtgagtcacggcaacaagaagtttcagctatttcacgacaattaaaaaagctagctaaggagcttcatgtgcccgtcattgccctttcgcagctatcacggtcagttgagcagagacaggataaacggcctgtactgtccgatattcgtgaatctggatcaattgaacaagatgccgacattgtttctttcttatatcgggatgattattatcgcgatgagcctaaagatggcgaaagtagtggcagtcaagatgaagttggcgcagaagacgataacggtgaagtagaagtcattattgaaaagaaccgttctggtagtcgggggacagttaaattaatgttctctaagccgtttaaccggttttcaaatttggattatgcacatgatcctaatggcaattaagattaatcaagtgtctgggaaaaaactaagtctcagatcatgaaaaaagaacgttgaatttttgtttcaacgctctttttgtatacttttagctccagccttgatattattaaatcatcacaaaataaaaacaaaaaggtggaaactaacatgtacaagaattatatcacaggtcaaactgctttaacacttaatctagattttgccattccggccaatcatttggctaatgtcatcagctggtttgtagattcaattccagaagatgttttagtaggcaagactgctaaaacgggccgcccagcctatcatccagccatgatgctcaaaatactgctttttgcttactccagaagagttttttctggcagaaagattgagttgatgctggaagaaaatctgccaatgatgatcttggctgaccagcaaaagatttcatatcatactatcaataattttagatcaagcagccatgccaatgaactgattaaaaagagctttatctacttcactaacctgttagaagatgaaggcttaatcaatgaaggtgctgcttttatcgatggtactaagattgaagctgatgctaaccgctatacatttgtctggcgcaaagcggttgaaaagtatcatgaaaagctgaaaggccaggcagttgaactttatgatgaattgattactaaagaagtagtcaaagaaatggaaaaagaaaaagttcaaactagtcaggggctaaaggaattagctcaagaaactgaagcagaaattaacaagctgactaaagagattgagcaggaaaacaaagccattcctggcggttcacctcgaaaagccaagcgacgtggactaaaaaagattctgcaccggctaagaaaagattatgtgccaagaatgcaaaaatatgaagaagccgaagagatctttgccggacgcaacagttattccaaaacagatcatgacgccacctttatgcatatgaaggaagaccacatgaaaaatggtcaattaaagcctggctacaatattcaagcagtcacgaccgatcaatatgtagttgattatgccatctttcctaatccgacagatttcaaaactttggagccggttttggatcaaatgaccgtgttggacaagtttgacaaaatcgtcgccgatgctggctatggcagtgaatacaattattcgatgctggaggaaaaatatccagacaagaagtactttattccctacactatgtatgaaaaagaacagaccaaaaagtataagaatgatccaactaagctaatcaactggtactacaatgaaaaagatgattattacattgatcatcatggcgtcagattcaatttcaaatattacagccagcgcaaggatcgttctactggtcaggtccgtgattttaaggtttatgaggcagacgagttccagctaacgccagaattggaacaattggctaaaacagctagcggccgccagcgccaagttcgctataatcctaactggcaatatttaaaagaaaaagcaaaagaagttctccaaagcgaagaaggcagacacatctatggcatgagaaaatatgatgtagagccagttttcggacatttgaagaacgtatttggcatgcgcagaacgcacctgcgaggtaaagagaaggtcgaaaccgatatcggaattgcctttatgatgatgaatttgaacaaatattgtcaaagaaggtggctgaagggccgatttttattgttaaaaattttaaagagaacaaaaaaacgatcaagattcttaaaaaaggaaatcttgatcgtttttattcatctggaagctagttttttcccagacacttttttgtacttaaataaaacacaaacaatatttgcatagtattgtactataatttatattttatattgaaagtacacttaatatttgttataactaatattgaaaagatcaaattacgaatatactactcatggaggaatagcgagtttatgaagtttaagaaaattttgcttggtgcgtgtgcagttttagcagtcgtttcactagctgcctgctcaaatagtaagaagagttcatcctcatcgaatgaacctaaggaattgaacgttgaatttgtaccaagtacccaagcaaataagatggaagctaaggccaagcctttaggcacattattgcaaaagcaattacacattccagttcacgtaaccgtttctaccgactatagtgggctggttgaagcaatgtcatctaagaaagttgacgtaggctttatgccaccatattcttacatattagctcataaaaagggaattgctgatgttttattgcaagccgaacgttacggctatgatgaaccatccggtaagatgaatcataccttaatgcataagtatcgtggtatgatcgtggttaagaagggctcaaagatcaaatcttggaaagacttaaagggtaaaaagattgcgattggcgatcctagttcttcatcgggctatgtttatccagttgcggaactttacaaaaagggtttgaatgtaaccaaggactgcaaattagttaatgttaagggtgacgatcaagaagtgttatccgttttgaatggggatgttgatgccgcattcgtcttctcagatgcacgtaatattgccgctaaggatgacaagaaagcaatgaccgatgttgtgccaatctactttaccaagtggattccaaacgatactattgcggttagaaaagatatgcctaaaaaattcagagttaaattagctaaggctttcaagaatattgctaagtctaagaagggtaagcaaattatcgaaagcatttataaccattatggttacgttgaagctaaggattccgactttgatggcttacgtcaataccaaaagattgtgaacaaggctaccggtggtaataattaagattaaaaaagcactcactaagtgctttttttgtattcatgctaagatcagttaaaataaataaaacactaaaagcaaaaatgaaaagagaagaaaaaatatgaaaattgctgttttaactgatagctcagcttatttaactaaagaacaacaagaaaaatatcaaatcgatgttttgccaattccaattatttggggcaaaaaagtatatcatgacttagtcgatattggttatgaagaattttatcaaaaactaaatacagcaaaagagctgccaactacttcgcagccttcaatcggtgatcttaagcagaagattgatgaatacgtggcagcaggctacacggatgttattgtaattactctttcaagtgggatttctagctatttctcaaccgttcagagtgttgcggcagaagaagaccgaatcaaggttcatccattcgatagtaaaattacctgtgctggtgaggcggattatgctatgttggcaggccgtttaatcgaggctggagcggatattgatttgatcatgcatgatcttaaggacctgcaaaaaacgatggatgtgcgctttatggtggacgatttgagccatttgaagcgtacaggtcgtttgtctaatgcggcaagttttgttgggacgctgtttaagattaagccgattttatcgatggatgtgcaaaatgaaggccatatttcagcgattgcgaaagagcgtcaatataaacgtgcatacaagcatgtgcaaaatgattttgataatttgactaaaaatatgccgtataagattcaggacacaatttttgattcacttgatcctgagaaaaaacaggcctggcttgatgattaccgagctaagttccctaagtataagtttgatactagtattatcggccctgttgttggggtgcatgtaggtcaaggtacaatgtcgatgatctggtgccgtgatttggatacttattttgatgaaaatggtcagccaatcaagggaattgagtcacaagcagtagtggatccagagtaagcataataccgatatggcaaaaaaatgagaggcactattgattctttaatatcattgctatattattattaataatttaatatggcgatgaatagggatgatcagagtgtcaatcagttctttttttaaaaagttaatagccaaaaataaactcttgtttttagctatggtgattactagtgcttttgcttctttagatggcgtcatttctccttatgttattgggaaaattactaatacactttctcagaaacattttagtgagataccgaaaatcttgttactgtatctgttgatgatgctttttctgaatgttagcttttatctatggcaattttgttggggaaaaattaccaaatcaagtaatgaattattgagatctacagcttttaataattttattgcttcccctagtgaaaagaaaatcactaataccctgaattttatcaatgttaatgttaaacaaattgaaaatcaatgtattgattcaacaattatgcttgtttactgcgttgagcaagccatcgtttcattagtttatattttaagtattaatggcattgcagcaatggttttcttagtttgtgggttaattccatcagttattccacgtttaactcgtaattgggttcagacaggaactaaaaagtggaatagcagttatgaaaactataatcaaaaaacaagtgatgctgtgtatggttttgatactatcagacatgcaaatggtgataatagattcaaaatatttgtccaaaaagcattaatgggagaagaaaagaagtattttttgatgaattttcggcgtaatacttctaattttttagcccaggtctcttattcattatcaatggttatttctttggctgttggtacattctttgtaattaatggtcaaattctagtaggtggtttgatttctctatttttagcatcagatcgtttaactagtccaattatttcgattgttaatattgcaaatcaattgacctctgttagtcctctgctaaaaaataaagctttacaaaaatctaaaaagcaagaatttaataatttagacttcaccaaattaccaaaccaagagaaaataatttttgatcactgcaatttagggtattctaataaagctattttgaagaatattaatttgacagtttctaaaggcaataaagtattgatcatcggtcgttctggtattggtaaatccactctgttcaagacattgcttaatgaaattccattgctaaagggcaaaatactggtagataatagtcttaaccaagctaatttctataccaattttggtattgttagtcaggatacttatatattcgctgaatctttgcgctttaatttaacgcttggaaaagattttcctactcagcaagtaataaatgttttgaaaactgttaaattaagttatttagctaatgaaaaaagcttagacatgcagatcggggagaagggattatcactttcgggtggagaaaaacgaaaactggaaattgcacgagctttattgaatcaaaaatcgattttacttgttgacgaaggactatctggacttgatgaagaaagcaataaacaaatttttgcacttcttcaaagtcttccgcagacagtaattgaaattgaacatgctgttagtccagaagagaaaaatcaatttgatcaaattattgatctaggagctcagtattgatttttttataaataaacaaaaacaattacatacgtatgaaagcctttacacataaagacttttttatttataatattagcagcacgaaaactttttggagaaaaacttacatacagaaaaggatgagaatatggcagaaaagaaatatgtcggcagtatcgaagcaggcggtactaaatttatcgtagctgtgcaagatgttgaaacaggtaaggaagtagcgcgtgatcgtattcctaccactactaacaaggagactttacaaaagactgctgaatttttcaaaaagcaccccgttgatgcattaggaattggtacttttggtccaattgatatcaatcctaactctcggacttatggttacattttggacacgcctaagccaggttggtcaggtacagatgtgaagggcttctttgaaagaaaattaggtattccagttgccatgacgactgacgttaacgcatcatgttatggtgaatatgttgctcgcggtcgcgatgattctaagagctacttctatgcaacagttggtactggcgttggagctggaattgtgcaagcgggtaagttgctcggtttgaataaccacccagaaatggggcacatgttggttcgtcgttatcctggtgatgattatgaaggccattgcccattccataatgatgcttgtgttgaaggcatgtctgctggtccaagtcttgagggcagaactggtatccctggtgaaaaattgtctcgcgataacaaggtcttcacttattctgcgtattacattgctcaaatgctcttcaatgtttacatggctgctcgtccagatgtaatgattgttggcggttcagttttaaatgaagatgatttggttaaggtaagaaagttctttgatgaatttaacaacaattacgttgccacacccgatttgaatgaattaattgtgcgtcctgctgtggctcacaacgggtctgcaactcttggcgattttgaattagctaagaatttgctcaaataaaaaagcatagataaattgaataagcaataaaaaggctcaactcgttaagaaagacgtaaggcgagccttttttgacgtaatttgacctaaatgcgcgtaatattaattctagaaacgtaaccggtttattaagaaaggagcccaactatgaacaaatcagatagtggcttaaaagacaaagttatcggtaaagtgaaagaagtcgaaggtaaaattaccggcgataaatcacgcgaagtccaaggaaaagctcaacaagccaagggcaaagttaaggacaaagccaaaaaattaaaggatgatctggaaaaagaccatcaaatagatgaagattgttaaagactcaggtcgactagcaatagctaaacagaaagcaaataggtgatcctatgttatcatggatctgggttttaatcgttggcgctataataggtctaatagctggtttcataaccggcaagggtggatcaatgggatttctagctaatttaatagcagggctggttggttcaaccttaggccaagcaatctttggttcgtgggggccgcaaatggctgggatggcaatcgtaccatcaatattgggagccgtcatcttggtactagtggtttcctttgtactagggatgcttagaaaaactgaataaaaatagaataagagaagtgtctgggaaaaaactaacccttagatactgaaagacgatcaatccaactcttaatttgagttgcttgaccgtctttttctgtctatttttatttttgaacaaagaaaattggtcttttgaccatcttctgttccaatatttgcttaaattcatcatcatgaaggctattcctatatctgtttcaaccttctttttgcctcttaaatgagttcggcgcatgccaaagacgttcttcaaatgtccaaaaatcggctccacatcatatttcctcatgctgtagatgtgtctgccttcaggactttggagaactgctttggctttttcttttaggtattgccagttaggattatagcgaacctgacgttggcgtccgctcttagtcttggctaagcgttctaattctggcgttagttgaaattcatctgcttcatagaccttaaaatcacgaacctgaccagtcgatcgatctttacgttgactataatatttgaagttgaatctgacgccattttgatcaaggtaataatcatctttttcatcatagaaccagttagccagcttagtcggatcgttgcgatgctttctggtcttttccttttcgtacatggtataaggaatatagtacttcttgtctgaatactcttcttctaacattgaataattatattcgctgccataaccagcatcagcgacaatcttgtcaaacttgtctagtgtcgtcatctgctttaaaaatggttcgaaagttctgaaatcagttggattagggtataaagcaaagtcaaccacatattgatcagtggtggcagcttgaatattgtagcctggcttgagctggccgttcttcatgtgatcttccttcatatgcatgaaagtcgcgtcatgatctgtcttagaatagctgttacgccctgcaaagatttctttcgcctcttcatatttcttcattcgaggaacatagtcttttcttagtttatgaagcagctttttaagaccgcgtcttcttgcttttctaggcgaaccgccagggattgctttgggttcttgctcaatttcttcggtcagcttttcaatctcggcttccgtttcttgtgctagctctgccaaaccttgactggtctggactttctcttttgccattgctttgacgacttctttggcaatcaattcatcataaagctcaaccgcttgacctttgagcttgtcatgaaatttttcaactgccttgcgccaaacaaaagtatagcgattggcgtcagcttcgattttagtgccatcaataaagatcgctccttcattgataaggccctcggcttctaacaaattggtaaagtagaggaagcttttcttaaccagctcattggcatgcttgctggatctaaagttattgatagtatggtaagaaatctgttggtgttcagccaaagccatcatcggcacgttttcttccagcattaattcgatttttctgcctgaaaatactcttctggaataagcaaaaagcaagattttaagcatcatcgctggatgataagctggacgaccggttttagcagtattacccaataagacatcttctggaattgaatcgacaaaccagctaatggtattagccaaatgattatgaggaatagcgaagtctaagttgagtgttaaagctgtttgacctatggtataattttgatacattaagattgccttctttctttttgttttgtggtgattcaataatatcaaggaaggcacttaaagtatagaaaaagaacgatgaaatccattaggaaatcatcgttcttttttcctgtctgagaattagttttttcccagacactttgtgtttcatgtgaaactattttagcttttttcgttcattttctttctcagctaaaaaacgttgcttaatttcttcaggcaaaagactagggaccgtcttgtcataaaattcaaagaatatgggtgccttgttagagtcattgctcttgggatataaggcaaagtcactttcgctaaacggtaagctgatattaccacgtaaagcattgataatctcaccgaacatatgcaaaacataacggcgcgtctcaggctctaatgacatgattacgcgactgaaacggacagtgcctaataatttatgggcagtaatttgaaaaatatcggtaatatttaattcatcaaatgcttggaaaagagcatcccataattcaccacgttgcttttcagggatgctgtggttaaagtcgatgaagaaatgccgcaaagaacgtgcacctgaagtaagtccttctgctagaacaaaactatcacggccaacagaccaacggcgtggatcatgttgctggaccatcggtgcagtgcttttgacgattaaaacgtgttcaggatgatcaagcatggtgccaatgattgaagcttctgggaggtaggtcttcatcttgggtaatgcacgtacaaagccaggtgctttccagacttggtggaaaaagccggggccgtcaaagctaaaggccttgataatacggtcctgcaaatcaggctcagcgacacttaaagcatattcagcgtaattgccacctttagagtgacctgctaaatatattttgtcgtgaggaaattccgcagcaatttcttttaaataatgagcagcaacatcttgcccatagactttaggcatgtagttcatgttcatatcttcgttccagccaattaatgaactgtcagtgccacgatagacaataataattttattgtcagttagtcgaaaagtagcagcggtgaattgcaaaggatatgggtctttttctaggcgattagtccagttaagaatcttaactttgcccaagcgaggtgatttgggcaaaagcagaacttgatcaccagctaaatctttcatttgtacctgaaatgaaggtagtactcgcagtttttcagctacttcgcttagggtgtgtcctttggcagatttgtcgacgggcagataaataatggaggcgaagagagagacatccacactattgaaaggacgctctttaaaagaaagatctccacgccaacgtaaatattcaagtgttccggccataatctcgtcctttctttcacttttagcaataatactattctactagattattgtggcaaaataaaaaatctcaggcgaatgcttgagatctaaacagaattttaaataccaccacgcgtatagctgatgcgcgtaatatctggatacttacgtaagttcatgataattgaattttcgtcaagtttattattgataaccccatcaatgtagaaaactatccgatcatcacttacgtctaaaattttgatagtaatattttcaactttattttctgcaagttcatgtttaattttagacaaaatgtggtgctggttaatagccacaatttgaatgttaaaacgaacatgtggcgttattttgttgataatgacatcatcgtgaaagatcatttgaatgataaacaatagggcggttgataggataccgatgaaatacatgccagcaccaacagccatcccaatggcggcagttgcccaaactccagcggcagtagttaagcctgagacctgttcttttctaactaggattgtacccgcaccaatgaaggaaattcctgtaacgatctgggccgcaattcttgatggatctagtgcaatgtcatgcatgcttaatagatcggtaaatccatatttagatacgatcatgaataaagcagaagcaatcgcaactacgatatgagttctcacacccgcgctttttctctgaatcgcccgctcatagccgattaatgcgccacaaaaagctgcgacaacaattctaagtagccaatctaattcggttgtaattggagctaaagtttgcattatttagtcctcatcctttgtataatcaacaattattatcatttctattttaacgtaaatgcagaaaaattatagtctggggaatttttttgaacttttttcaaaaaagacttgcacagctctcgtctatgtggtttaattaatactgttgttgggtgagacaacgaagagttgctgacttagctcagttggcagagcacctcactagtaatgaggaggtcggaggttcgaaccctctagtcagcattagttaaacaatttaatagtttttaagtctatcaattaagttcgaaagagcttgatatgataggcttttttgttgtttctagatatttgtgtagatttaaaaatagttatgaatatttagtttcaccacaaaaattgccacacagtttttctagtgtggcatctgtgtggcaaaggttcgattaatgttgtagtggcgggctttattgcttgccatttttttcgttttcaaagtatccatgatttaagaatgactgtcgatactcttttaagatttttatttgatggtctatggcaggaactaacgtatatgcattatttttattgtagaattcatccattaatttagtattcgattccttgtagtccttaatgaaattactatcattttgattcataataatttcttctaactgcatacgaataactaaattaacattattaatcatttcaagatcattggcaccttccaatgattcttcaaattttttatcaaataaaaatttgaatttatctttccaaaaatttattacgtatgatttctttttataatcttcatcatttttagtaaaagaatcagcggtatctttatctccatttatagaaagaaagtgagaaatattatttttcatattactcaattcttcattattatcataatatgctgaaaaaagtaaattaattaacttactctctacttcttcacctctaattccttcgccttttacataagatactggaactttaaatatttctgctaaagctttccatacctcttcatttggaattctgcttcctgcttcgtatcttgctattgttactcgtgtagctgatatgtttttgttctttaaaagattagatagatcttgttgtgtaaaataatttttttctcttagttctttaattcgatttggagtcatattattacctcactaagattaattttatacgattggtacataattagcaaaagtaccaattttggatacaaaagtgttgactacaagaatgaataattgtatattatatgtaaccaaatgtggtacacaaaattataaataaccatttttggaaacaaaaaagaaagagggaatattaaaaatgtccagtaatgtaacaaagcaaggtgaagtactatctaccttcaacgaaagtagtagtaaaagaaccccaattcaatcagcattaacaagaccgttggttgaagcaattggtaagtgttttctattgttgagcggaaccacagaagaagttcaagatcctaatgatgagtctaaaactattccgcgcgcagtatacgaagtaagagttattagctctaaaactagattacctattggaactgtgctaacggtgaaaattaaaggaggtaagagtgtaattactgatgaagagaataagaagttactgttaggcttagagaaaaataaggtagtagcattcgacgatctaagtcattggaactttaacggaaatgagggattatcagcttcaggtatgcgagtattagaagtcagtccgcaagaggctatgaatttatagaaatgaggcggcttatatgaaaataaaaaaattagtcttagataccaaaaacccgttaggcaatcctaacggggtaaaaatggcattaggagtaactttattatcttcaattggtcttgagtataaagttgcacctcaattcataaatgctggtaattataccgcattagcttatccatttttaattaatattatacctctagggtatccatgctggaaatgggttaatctccatatcgttaattataagatctataagcaattgatgaatattgttcattcggaacaattaatagactatggagataaaaaagaaactaccactttcggtgaaagaaaagttgaatatggtgtcaagatcgtctatgaagaaacggcagaaggtacatatattactgtatatcctaatggtataaaacatagcgacgccactcagacgctaaacaataggctagaggaaactttcaacatgaatgttttatcggtagatcatcagctagcttatacgaaatatttattgagaaatgtaaacagacaaagaatggaggtttctaatgataacttctaatttcgtaataaatcttgataagaatacatcattcagttttaaaggtagtggtgggattcttgtcactgggagaagtggctcaggcaagactaataccaccacatatataatgctgaaggcgatgtcccaatgtgattgcggtttatatattattgatgcaaaaagagctgatatgtatggacttcatcaatttttaaaagatggcaagaaggtagtggcaagtacaacaaatcaaatagcacgattgttgcgtgttcttaatgagaacatgagcgcacggtatgagcattttaagaatggaaaatggggacaggatttcgctgaatatggatatagaccatatttattagtcattgatgaagtatctgcgatgttggctggggctggtaagaataagaaagaaataatgggtgaattgcgtcaagttatccttcgtggacgacaagcagggatatttacccttatttcagggcagagaattgatgcaactattttagatcgtgatattaccttacagttaggtacaagaatcgtgatgggacaagcagattcggagacttatcgcatggcttacccaatggtaaatgatattaaagcattaccattagtacctaataagccggggtatggtcttatctattcagatgggcaaaaaattagcaatcctactccatttgtctcaccggatatgtctaacattgatgttccaggggtaattacgaggttagagaataattttgatccatctaaatatattgatgaatcaagctattgggaggtttagtaattgataagttgccagctggcgggcgacagagtcgcacgaatggaatgtccaagcgtgagcgggctggcaacacccaactaataatatgggtgtaacggaaagattattaatcatggaaacgatgaataatattaaaattgatcaacttcgtctaaatattccatatgatgaaatctatcaagtagaaaatagtcaaagtttacccaaagaagttatagtagctgataatctgctgcatctggcatggttgtttaagtctaatacagtgagtcatggacataatggctatacttcttcatataatttcggttcaggagaacaaggcggaaatatttccgtaatgtggaacgagtcaagaaaagatatgggaatactagtcgactttactgcgacaggcaaagcgctatatgaaagccttgctgaattacatggaattcctgttaattggaagaaaataattgaagaattatatgaaaaaatggggcatatatcgaggctagatatagctactgaccttattaattatggtttttcagttaacgaaattattcaaaggttaaagaatgaagaatcatttttcttgaatactcaaggaaataaaatcaatgctaatcgatttaagataattggaagctatagtgaagctcagactctatatatcggtagtagaaaaagtgatgcttttctgagaatttatgataaaaaagttgaacaggatcgagccgatggactctatagaaacttggctagaaactgtaacgattggataagagtagaagcagaatttaaacaccgtttagctaaagaactaggaaaatatattacaacattaactgcagataatatttatccttatttacttggctgtgtactagaacgttggtcattagttgatagggaagaataatgacatatgaaaaattccaatattctaaagaatggaagattttaaaagagttatcgaaaggacaaggacttcaagaactaaaacaagctcaagttgacgcttccctgaatagaaaaattaattggttcttgtatggtggtgccagtggagttattacgttgattaaagaaatttatggtgatgaagcactaaaaaagttttatcaatttttagattattttatttctaatcctgatacgttaggacattactaccactcggacaagataaaggcggatactaaaactattgcagattctacgcaaggcttgaactttggagaatatttagaagacttaaagagagaattagttgagggagataaacagaaaggcaggggctaatatgtttggcacagagttactcaacgctagacaaatagcagaagaattaggtattagctatacttacttttttaaattaattaaaaatgggtgtccttatcatcaacttggagaccaaggacgtaaatattacgttttaaaggaagtacaagagtggctattagtaagtagccaacattaattagaagacgtagcaacttgctacgcttttttaggagaaagctatgtcaattacacaaattaaaacggggaaaaataaaggaaaataccgtgttagaattcaacctactgataatgaaacaggtaaaactattccgattcctagtaaagtaacaaaaactagcagtaagcgtgaagcaaaacaattagaagaacaaatgtgggtgcaatatcgcgcgcataaagaaatgaatttaaatgtattagatcaaccacttgcaaaagctttagatcactatgtagaagaagaaagaagttcggggcgttggtcatcgattactacgtatgataattggaaatatacggttaagcttgtttctcaatatttcggaaagaaaaaagttaaagatatcaaagaaaaagatatgcgtagttttgctagaaattacataagtacacataaagcaactgtggcacctcattcaacgctagatagacagttacaaaatttaaggagttattttgctactttgaaggaatatggtgtcttaaagaatcctattcctatgaagccattaactaagttttttagacgtgatgaaatgaatgcccctgttaagaaatatgttttcactaataatgaaattaatgttcttaaagatagaatttatagagagcttggagtaacaagaataagttattggacaactagaattgctatcttgatagctctagatactggaatgagacctcaagaaattcaggctttaaagtggagtcaaattactaatgatggaagttttaaagtttttagaataaatgactcatggaatgaaaaagagaagcatcttaacggacatttgaaaagtcgaccgcatggagaatctagactaacccttcccctttctgaaccacttttgcagttattgaataagtttcgtcattgtcagttagaacttttaaaggagaatggtttaactaattttaatgatcgaattttattgaacatcacagattatcacttgtgcgcattagggtatccaataactcaaaaaagtatgaatgatatgttgaaacagttgagtaagaaagtaggggttaataatcaaaatttaaatataagtatgtatacttgtcgtcatactgtagcaacaaaattagggaatacaccaggcatgtcttacccttgggcggcaagcagattagggcattctttaaagatgtttatgcggacatatgtacatgttgatgaagatcgaaatgaagaaatgcttagattgatagctaaaagataaaagaaaaatgcaaaaataacttatatttgataaaaaaatgaattaatgtagtaatagcaagaatttgaaaataataaataacaaataatttttaacattttatagattttgaaaaaaaaagagcgtatactcagggcatcataaagagatgtgaaggagaaatcaaaatggttattgtagaacaaaagtttaataaatataatcatacaagcaacatggatgctatggagtacgctgcaggatgttgcacatgtacaacaacaagttgtacaacttcatgtgccgctgtagctgaaagttaatggatagttggcgctgtaaattatattacagtgctttttttaggagtataaatactgttatgtgtctattaagaataaaagacttaaaagttaattttaaggatcaaacagtactggattttagaggtcatgatatagagataaagtcaggagacaaagtagctctaattggaaaaaatggggcaggaaaaagtacactattaaattgtcttttacatgaagtaaaatacactggctgtataaaggagaagtatcatcagtcggatataggagtagtttttcaagaaaatgtatattttaaattcttgaaagtttatgaaatctttgaattagtgtggaataaacctaaaaagttaattttaaaatctaaatttattaagaattttaatttagcaagcattatgaataaatacatttctgacttatctggtggtgaaaaacagagattaacaatagctttggttttttctcaaaataaaaagatttacttactagatgaaataaattccggcttagattatgataacaggcatgaattaagtaaaatcataaataatattactgaagaaaaaacagtaatacaaataagtcattattttgaagaagttgaaaattgggctaataaattgataatccttgatagaggcaagatgatatattttggaagcttatctaagttttattctataaataagcatgattcattaattattataaatgataaaaaaagcctatctagactgacccagaagcctttaaatctttatagtaataaatatattgtatctagtagtattgatgagagacatgatataacaaatttattagagcaacaaaagatagattataaagtggtgccacaaaatttatacacaacttataaattagcattagtaaaacatgaggataggtaaaataatggctagagaaattttattaagtttaaaagcacaacttagagttccaattgctgtatttttttctattttttttccaattattatgatgattatgatgatgacatcttacggtaatttttcattaagaaatggatatcactttatagataagtatttttttattagtactactataggtattctacctctaaccttaattagttttcctattgatataaataatttgcttgaaactaagcattacttacgtttgaaatacttaaatgttgatttaaaaaaattatttttatcaaatattatttcttatttgataattgtatttatttcagttggaataaatttaatagtaggaaaaagtatatataatttaagattacctagtatagagtatttatgttatttttttattcaattattctattgtgcgatagttctacttatatttggcttactgttaagtttaatagtatcagatatcaaagctttaatgcctgtaggaatgactataatgtttatattatttatggttataggtgtttttgtacagtatagctccttaccgaaaattatacgtactatttctagctacataccagtaaaatatttggcaaatgatttctattatatctggattggtcaggctaaatggaatatgccattttttaaatgtaatacgatctggcttatttttctgtgtttgatttgttacataatttatagaaggaagaataatgttacgaagattttcaactagtaaggatttaagaattgggatagagataatagttggaatcactttatcatttatcattaattttataatgatttcaattgggtatgccattacaaatagtgaaaaattaaaagaatattcggtcaattattttggattagtcatatataaaataaagaattatggaaataaaggtataccagtttccaataatatgatgtttatcggaatagttttaacaataatatttgtttttattgtagagtgggttgtatataagagggataagaatggtagagtatgagcttaaaggattatttaatcaaaatacgctttcaacatcagatattagtaataataataattacaataatcaacaattatttgatcatattataagaggaaatgctaattctgagatgctgacatacttacttaatatgaaccatcagcgattgaatgattttaagagtatgcatcaatataattatggaaattttgcatccttaatgaacagtgtagaacagtataacgaaatagaaaatgatgaaactattttgctacctaagccattgagaataaaaaataagttacagcaggttctaaagaaaagaaaaagtgttagaaattatataggcttatcatgtgatttacgagaattgtccacaatattgatgtattcatttggaatctcgggaagaaaagagaattttggtggaatagtcgcaagtatgcgatattacgcttctggaggtgctctatatccaatttcagtgattatatatataaataaggtggatggattgaaaaaggggctgtatttatatcagccaatgtatcattccttattaccactaaatattaaaactcaaatcgatattaataaattatttgtaggaagtaacattgatgttaaaaatagtagcttttttgtattttataaatatgcgattagttctacatatttaaaatatggtgagctatctttagctaatattttgattgaagcgggaatgatggcgcaaaatttttccttagtaactacagcatgtggttttgggtcatgtccaattgcaggatataacaaaagatttattgaagatatttgtaatttagatcatgttaatgagcatataatttttactgaaagttgtgggagaaatgaatagcgatacgattttttttgtaaaaaaagatacacatattaattctaatataaacgaatggatattaagtaagggaataattcataaaagcactttaacaataagtaaaaatgaaagtagtactttgtttgtaagtttattcaagcaattaatacaaaatcaggaaattaaagttagtgaagatgatgaagagtattcagactttaaaaaacttgttcagcttggatttttaggaataagaaataaaaataaaaaagtagcacttattgtggaagaaagtgcaaaaaacttctttgaaaactatttaaaagatgaaaatatatgtgttagctcattagatgagtttataactcaagatacattaaatattttaattgaagaaaaaaataatactaaattaaataaaatagttcaaaactataaaaataaatacaaagatgtagatttgatttttgtttgttctttgtattatgaaaattatttaaaaggaatcaacaagctaactaaattaattagtatcccatataatataggattttatgataataataatatatttgctactagaataatacatggagagactggctgctatcaatgtcttgaaaatcaaatactacaaaaatttgatggatatatcgaagattatgtatcagaaatggattctgaaaaacaagtatttgatataaaaaattatggagtattaatatctataattaagtcagagatagaagaactaaatttatactctgatacagagctacgaggaaatgttcttcatttttatttacctacttatgaatacaattttgataagaatagaattcaaagtgattgctcagtttgttctactataaataatattttatttaaagaacaaaatatgaaagcgtgcaatattttagccgaggttttaggtaatgataaatatcaagaataatttagaatataatttattgcgtcaacggatcttgggtggcgctataactggaatctggaaaaaggatactttctttattggcgaaagttcgtatccggtaatgaattataattatattactgcaaactttactaattttgaaaaattcgcttttcctggctatgttcccccgattaattatcatcttagtggctacggcttatcttataataaagctttatcggcttttctaggtgaaagtacagaaagatattctttttcagtcttatatcaaaacattaagcataatatcatttattctgattatcaaaatcttcagaaaaagtattctaattgttatatagtacctttaaattatattaatatttatttttcaaaagaagataaagaaaattatataactaaaaaagatccaataagatggatagcattaaattcactatttgatattaataaaaaggtactagttccgcttcagttttatattatgtataccaacagtatatttaaaaatgaaaaaagaattgtaaatagtgctacatcaacaggaactgcttcgcaagaaagctttgataaaagtctggaaaatgccatagttgagttcttacaaatagattcttttaatctttggtggtatggaggtctaagaggtaaaaatttaaatattgatacagaaggcttattaaaggaattgttcccaaacaataatagactttggatgtttttaaaaaaatttacggttaattttatagatattagttttgacaaagcaattaatgtagttgtttgcgaaattaccagtaatagtgatagtaaactacctaaatatgtagtaggagttcaaggaggattttgtttaaataagtgtattgaacgatccttttttgaatgtgtaactgttttagaatattgttttactcaaagttgggttgaaggttctaaatttaaaaagatttctacaaatatagatgatttaaatgtaaataatttagacgataatgtattgttttatgctaaaaatggaaagcctaaattaatcaaaaaagagaatattttaagagtgtccaaaaaggttactaatttaaaagatttgcttttgaatttaaagagcatctctaagtatgcaggatatttaaatattacgcctccagaatttagaaatcaaaactttgaaatatgtagagtatttataccagagcttttaccaatttctttaccgtcttatccgccttattatcatccaagatacagtaaaataggaggtattattaataatgtcccccatcctttggcttaaaatagcttttttcatcactttgtttccaggcggaatatatttgataataagaagaatattgtccagccatagaaaaagcataacagtatatttaataaccttggtaattgtagctattgtaaataccattattttaaagatcaattttaataggtatattgaaatcatcttaatattgattattccttttacgtattatttttttgagtatgttataaggtataaaagattcaatatcttaagttttaaggctaataaaacaattatttatgttttagttttttttcctatatttgaagaagttgtttaccgtttctttatatttaaatattgttcggttttaggcttttctggaatacaggctatgatatttgcaacgttatgctttgaattttcgcacatatattatttaggctttaaagctattaataaattatttttttcctttattcaaagtatgttgtttttggtttttcaaagtttattgttaataatatgtttacacataatttttaatttatatgtgtatttacacaaaaaagatatgtataaagttattttttgatattgacttgtattacgtatataacaatatgtgccacacggtttctagaaaaatcctaaagagtgctaattttaaaagcaaaaattgttaagccttttacgcttctagtcagcattagaaatacgtttaagtctttcaaataagttcaatgaagcttgatttgaaaggcttttttgctactttgaactagaatgaaattctttgaaataataaggatttatttgaaattaacacaattcaaacacacagatacgattcatgtgttaagaatgtgcttgaaggaaaattaagagtactaaatatagtgatttaacaggcgttggagcctgttttttttgtgtttggttagggcattttgtttaaattaaattcagtcctgaattgtcaaattaagtgcaacagttaggttatgaagagatatattgcttgaagagttcctctgctgtgtgatattggaggattcggcgatatttgtggttaatggcatcagttgcctgttgaacataagcttttgacttgtctttcatgctcttgcccttagggaagaattgacgcaaaagaccattgcagttctcattggtgcccctttcccatggagaatatgggtgagcaaagtaaatctggcagcccttgatcttggtcatatccgcaaactcagagccattgtcaaacgtgattgatttaaaccaggcaggatgtctgtcaatctccttttgaagcagcctttggcatgtgcttgcccgatagtcaggaatcttgataactacttcaaagcgtgtggttctttcagtcaaagtcattaaagcaggctgattcttgcgtctgacgcctttaaccagatctccttcccagtgcagcggagcttttctgtcttcaatctctttaggacgctgttcaatggaattgccaagatgcttcttgtgcaaagcgtgaccgccatggctgtgatgacgcttgttcctgcgtcttttgagcttcataggcagatcaatattgcttatgtccagcaagccctgatcaatatagcgatagacggttggtgtgctgggacaagggtagcctggcatagtccttttgaattcaccaacgaactcatcgatgctggtggcatcaaatttagctttaaagcgtctggagagcattctcaaaaagacagcataatgcttcaatggattgcgctgatagcagtttttgcgacgcttctcataataaatctgtgcagtatcagcgtaatagtgctcatacaataaatagctgctgtctctttgcaggacgcttccgcgtttgatttcgcgactgattgtcgacttatggcagccaacttcttgagcgataacagtacgggaagttatgccggaatccagcattgcttgaatttgtccacgttgtacgctggttaattgatgatagtgcttagaaatgctagaatttgaattggtcatgaagatcttcctttcttgatttttcgtcacttcaagtttaggtcttcatggcctttttgtttaacacttagtgttgcacttcaattttaaatccgggaaattaaattcagtggatttttgtgcaaaaaaatagccatattgtagggttatacatattgactattttctattattaaaattatttcaattcagccacaaacctaattccttgataagaaggaaacttgtaattatcccatgaaaaataagtgtctggaaattagttctttctatttaatctcaatgctatttcaagttagctattaatctgtatcctaagaatccattgctagattttggattccaagcaatacctacaccaatttttgtatattgaccagataaaagaatgtctctatgtccccaattagatcctgcatcatgataaatgaaattatttaagcaaatttttgcttgtgtagatggggtatcagtattatcaactgcacctccagcaagcacttctgcgtattgagtgcggcttccgtctggccttgtatggctaaaacttgtatttgcttcggtagctctagtccttgcatattcttgcagagaagtatcaagtgttaaagaatttagtccctttgattgacgtaattgatttaattgcgcaataaattcttgttctaatttggtagcaaaatcagaatccttaatgtttgtatattcattattgggttttgtatttgtggtttcattatgcttaataaaattgcttgaattagcactttgagtatttgtttcatcggatgtacttttagtaatagcagatgttttagaagtgtcaggttctgaaactttgtgagttaattctgaactaatccatttgttagttccaactttgtaccatgttttaccacggctatccttcttttctgcataaacatataagtattttttaccatgaattattttagtgcggtaagcttttacacttctgcctttcttgagtgttcttgctcctttaatacgcttgcctttatagttgtaaacataagcattgtgagtaagttttacgctgctagtgcttgcttctactacattggcttgttcgttgccagcaacaactgtagctgaaagcaatagagctgatgaaagcgtaatggttgatagtaatttagtaacgtttttcttttgtaacatggtagttacctcctatattccttatttcagattagcaataagactgtaccctaaaaatccgttacttaatacgggatcgaaagcaaatccaactccaatttttgtatattgactagataaaagaatgtctctatgtccccaattagatcctgcatcatgatagatgaagcttctcaattgttggctggcttcttgctctggtgtacttgtgtcgttaactgttcctcctgcaagtacttctgcatattgagttctacttccatcgggtctaatatggtcaaatttagtattggcttcattagctctggttactgcataagattgaagtgtattatctatgcttaatggcgctaacccattggatctacgtaattcatttaattgagttacaaaagattgttcagtttcatttgcaaagtttgagtttatgatatttgaatacgtctgttcatttgaagccgaattattatcttgttgagtaatactttgtgaatctgctttttgacagtttttggaactatttctttttgtataaaatttatcagtgtcagtagcaagtatccatttgttatcaccaattttataccaaattttatcgttaactttttcttgagcataaacttttacagattgtccgactccaatgtattcgccagtaggtgattgattgggagctttatatgtttcacccaatccattatctgtaatttttgcagtgaacaaataatttgattttgtgttttgcacatttgcgagcctgatatagtgatgactaccaatgtataaatattttgtgccacgtattttcttagtgcgataggcttttacatatttgccttttttgagtaatttaacacctctaatacggttgcctttgtagttatagacataagcattatgcgtaagtcttacatttttagtgcttgcttccactacattagcttgttcgttacttgtaacaactgtagctgaaagcaatagagtggatgaaagtgtaatggtcgatagtaatttaacaacttttttcttttgtaacatattagttacctcctacggatattcattatttcaatttctaaattaatgatacatgatgtgaaaatgcatttcactgctgtttttctttgctggaattatatttatctctcgtaaatttataaaaaagtaaaagattgaaaagttaggtgcatcatttaatacaaaatataaactgaaatagattctcgttgaatttggaaactgtcaaatcttttgtgtaaatagttctttctcgtaaattgattttttaattatttatttaatcaaagtaggattctaaggtgtcctgaacctgaccaaagcctttatgaattcgattgaaataacggtcattgtagctcattgcctgaatgccaataaaagcatcaagcgactgttcagttggaaactctgccttaggcttagctttgcgcttgatcacattgttaaatgattcaatcatgttagtcgaataaattgaagctctgatctgcttgggatagttataaaagaccagcagatctggttctatgtctttcaagcttctgataacatggctgtaaaccttgccccatttggtatagaagtcatgcaggacagctgtggcttcttctttgtttgtctgttgatgcacctgtttgaattcgttcatgatcttttcacgatcgtcgacgcgtactttagcgcagatattgcgcatgacatgaaccaaacagcgttgaaaatgagctttaggataagtcctggccaaggctgttttcatgccaacaacaccatcagaaagaaaaagctcaacttgctttaagcctcgggatttcatgttttgaagcatatctgtccagacttcaatgttctcgctaggcgcaatgcagtagtcaatgacctccttgtgcccattaggcttgatgccaatggcaatatagactgcttcacgctcaaatgtttctcggcgcaaaggaaggtatgtcgcatccaaatagacgcagaaaaacttgtcgcttagcttgcgtttgtggtaagcctcaacctttggaatcatctgcttggaaatatttgatacctgagctggactgtaatggctgccatacatcttttcaattagatcggctatttccctggtggtcacgcccttggagtaaagcttgataatcatgctttccaagatatccgagtgctgcttgtagtcaggcagcgtgtgctgatgaaattgaccgttgcgatcccgaggcacttgcacttcaattgggccaaattgcgtatcaactttgcggaaataagcaccatttctagagttgccagtattccagccatttctggcatagggatcatagcccagaaaggcagtcaattcagcttctaacaagttattaacagcctgttgtagctctttgcgcaataaatcatttattttgtctggattgaatagagcttgagcaaaatctttggtaaaatcattcatgaaggagttcttctttctgtatgtgtttttttgttcaaaccaatcatacgagaaaggaactcctttttctaatgtttaaagaaataaatttaaggaatcattcatccttacacaaactattttacagtctcttaatttgacaagcaatatacagaaattatcaataaaaagtacgttttgctataccttttcataaacctgactacaatgagagttgaagaaggcgtttttgtatgacaaaagaatatgaaaaagaagtcaaagaagcagaaagcgtattggaggaccaaaagttaactgatagtgagatttcacaagaattgatttccaaagataatccaactgaaaatgtaaaaccatctgagattgatttcttgcgtaaaaagccaaatttgacaacgcaaattgatttcactttgttagctgatcttgctgggttatccaaggaagctaaggcagaagcggctgtatagataaaaattttacgtagaaaaaagaccggtttgaaccgatctttatcttataaaaatttactttaggagcgtttgtgaaacttagctactccccaactgattagatagaaagtcgaaatcaaaatgaattgaatttttaattctaaaatgaatagtggaaagtaaaataaaacggaaaacaatagaataatagcgtaaattccttcgaatgttagaaataatctgtttctttttctatttttaagtgttgctagtatcattttttcattcacaaagatccctcctaaaaattatgaaattaagaccaacttaaataaggaatagtccatcggataggaacacctaggagccaatgtccggagctgagaaaagtgttttttaacacaacggtagtaacaattgcaataactgcgagtactaccaataagattagtaatgtactttgtttaatttttgacatgattaatgcatcctcctaatattttttaaacttctattattttgctgggataatgaccggtaattgccaccacattactgtagcctcctcccttttttaatcatttagtcggtttggttaaatactactccttagtgactagaacagattaattttgtatcacatagtttacaaattatttgggccaagttttaattaaatcttgataaccatatttttgtacttcatttctaattttttgcgcttcctctttattgtttaaaaataaattctttaaatataaagcagcaatcttataaagcaaaaaatgtatggttggttttgattccatgatgtagtcaattatttttggaacatgcattaattgaagtgattttttagaaagttttctattatagcaaaccgctagataattctcgaagacacgcaagtatctttcttgttctaattcggagatatttttattgcttttcatctcgttaagtagtctattgataaaaaatgcaagggtatcttgttcccagagcggcattgtattagtaaaaagtcgcagtaattcaggattagtcatccagttttgtccttcgttaaattcaatgaatagatctttttttattttgggatcgatttgatttaatttattttttaaatatgctacagaaatcatagctcttaattttaaaatcttagagtgagattgtgacagaatttcttgatagcatgattcaatttcatcaatttttcctacattgaaggcttgttccattttattatttaaatctgattcaatctttttttgctttgaagtataggttgctcgcaataattggtaaaagtaagtaatatcaacatcatgttcaaaaagaatcgcggctaatttatctgcactaattctgctttttcccgcttctactttcgcataaaaaggccgagtaacaatgttagcagccatttctttttgagtgaggtctagattttgtctaatttttcgtagtgcttgtccaatagtcataaaaaatcctttactctaaaatattttcttctctacgatatatgattattataaatgatgaaaatataagcggataaattaaagagaactatggatatcggaacggcattaagacatttgagagatgatctaggtttgacacaaaagcaaatgattcaggggacgaaaataactgttagtcactattctaaattagagaagggacaaaacaggatatttatcgaaaacctagtcgagatattgaagcaacgaaatatttctttatcatattttgttgatcactatcttaatgatgaaaatagtgaaaaagaagtaaattattcagaaatattaaatattgctttttacgaaaaagataagatcgctgctgaagaaataaaacgacaaattttttcagataagagttctagcaatgaattgagagatagagcaacattaattgtggatatgatagacaaccagggacagagtaatgttgatgctcgaatcattaattctattttcaaacatgacaactggactcagtatgacgaggcaataatattattgggtaatattattagaactagtaatgtattaaatatgagtcctttggtattgactctaattagaaaatataaagatctagataaagaaaaaatcgaaaaacaaagaaggttagcaacggttggaattaattatttatttaattttcgaaagttaagtaaagagtttaataaaactgtgctaaaaattataagctggattaaaacaacatcgattgttcctgagttaggcattattcgagaattaaatgcatattttttagcagtttatgaaggaaacatttctgtctcaactaatatcaaaaatgtccttaaaatatcaggttatcaaaatcttgctaatgatttacctaattaatcccctgagaggggattgagttgctgtggaatgagaagtagataaaatcatagttaattaaatatgaaagagaggcatagtaatttgattattgttagttatccagttttacctgaataactctgagttcatacagtacgaggagatataaattatgaaaaaaagattttgttaagcctaagtttagtagtattaggaaatactttgttttttaattcgagtgtagcttctgcagcgactaataatagatattccgtaaataatacaattcgtcaggcacctaatactggcgatgttcctggtggatggggcattactcctggtcatacacattggggctaagtgatagaagcgatgaatgaattttcattgctctttttattttgggatgcgaattttatgaagaaaagtaaaatcatatttttaatagagcttgtattaaatattattgctgctgtttttctagtaataaataattcattcaaaaatttattagatgtaggcgttgtatttttactacttctattgcttatttggaattttttaagaagaaaaattgagattagtttaaaactatcatggctcaatcttatgatattaccagcaatttttacttattgcttaaatactgtagctaatgttttattggtaaaatatcctgttaaaagtgttttaatagctataatttatagtttgttattcttagtttatttgcttccggtagtaattactaatgcgggattggttaagaataagtatgctagagtttttattgcaatgtattatattgtgctattactttttagcgaaaacttacatatgaatgactacttatcatcctttgtaaattggtctcactctgaaattcttaatgggttagcgttaattccaatcatattttgcttatttaaaagttgggatattcgagcaaagcttaatcttaaatttaggcgatattcaaatatacagttaatagttttattagtagctgtattctttgctgcttggtattccttctttcatagctatgtttatattgcaccaactttttcgcaattattttggaattgggacttctcggaaattatcccaactgaacgagctgttttatggagtttaggagcgattttattcgaagaaggattccggtatctattaataattgtattgcttgaagtttttaaagtgcaaaggggtcaaattgactattttcttgagtgcgctattttttggattgatacattatgccggactacttgaccaaggcccaatatttataatttcaacgcaagcaatttttgcttttggttatggctgctttttggcgacactgtacttatattctggaaaattctggttagtattgctttcacatttttcattagatcttattgcattctcgctttctgcaggtggtggcggaatactatcatggtatggcaataatgatctcttgagtaatggtttgagcatggtttttgctttagttatgacattgattatgtttttaggtaaacaaaggaaaattatgcaagaaaatgctgctagattaattaatgcatgatgcatttaagatggtcgaaagatcatcttttttatgcaataaagtgtcatatataattgacacctactataaaagttgctattattttaaaaacgtcacatataaatgacatctaactagatgaataaagaagaattcaatgaatcgagtaagggaatatcgtaagcaaaagcaaatatcacaaatggagcttgctagacgaataggggtggcaaggcaaaccattaatttgattgagaatgataagtataatccatcgttagaattatgcctaaacttggcgcatgcattaggaacggatttgaatactttgttttgggatggggatgaagcaaaatgagacgagaaagtttatggcttaagtttgtcagatattggtatggcattgatagtaaattagacgagcggcaattagcagaggttgaacgaatcggtaataatgcctatgtaatctctggtatagtggaactgatcttactggttatcacgctaattatggcattgactattaaaagtgagctggctttgtggtttttacctttggcgattgcaattatgatgctgatgatgagtgcttatacttatttgacaatgcgaaaatttaaaatattctctgtcgaaattacagcagatgaacgccccaaagcaattcgtagaatatggataaaggctataatagcgggaataattggtgcagtttttggtacattaggtagcgcgctaggagcttcttctgtgcaaaataatctagtaaatgtgcttgatttttggccacaaggtttatggctaggcgtatgttgcggtgctggtagtgcgattggaagagtgcaacgattgaaagtaattaaagaagacgaataagcgaatcgaaagtagtcgatccgctttttttgctgaaaaactatataattaaagtaacaataaaatttacagcaaggcaaaaaggatgaaaaaacaaaataagactggctcaattggcgtagtgggtgccacggccatcggtgttggtggcatgatgggagcaggcctatatacattgctcggcttggccgccaactctgctggtgtttggctgccagtatcatttctaattggaggcattgtggccgcattttcagtttattcgtattcaaagttaggaatgaagtatccagatcgaggcggtgccgctaagtttttgctaaaagaattcggagatggcctgctagctggtgggatgaacgtcttccagtatatcggctggattatcgccatggcgttatatgcgaccggatttgcggaatatgcctgccaactattgggaaaatcaagctcaggctggctaggtaaggcaatcagtatcggaattgtcatcgtggttgtggcaattaatattatgggttcaaagcaagtggcacgtgcgcaaacggcaattattgcgtttgaattgttaatcttactgtcttttgtagcggtaggtttaactaagctgcatgtgccgacaattactagttcaaatagcggcaatattgtaggtatcctatctgctgcgggtttactttacgtaacttatgaaggttttggcgtagttactaacgctgcagggagtatggtaaatcctaaaaagcagttgccacaagcgctgttcttttcattagggatcgtcatggtgatttacattgtagctagtgtagtcgtggtgatgaccttaggcgttcaaggcgcagtagctaatcaaggccacgttttggcaacggctggtaagctagtattaggcaactggggtctgttcatcacttcactgattgtctgcatcttcgttgtgattttcccattatcagctgttggtgagatggccagcctagcctttttattggtgtatgccatggttaacttaggccacttgcgcattgcaggacaaactggggccaagcgctggattttgatttgctctgttgtattgaatctagctttgtttgctttgttgtttattcagacaattctcaaccacgaaactttaacttggatttcagtaattgctttgttaattattagttttttagttgaacttgcttggcgaaaaaagaataaacgcaacctgcattgattaggaaaaaaatagtaatttatgatacaaaaagtcgacttttgttccacttattgggtacaaaagtcggctttttgtttttttcgttgtcaaaacaatatctttaatattttaattcagatatactctctttgatcaagtttgaagtgagggaaaatgaatgaaaaagttattgatcggaagcgcagtcttagctgccttattaattaaagaaaatatcgcagtaaatgcggcaatagagcaaaacgaaacaacgcctaagattgcagttactgacaaaaaagagaagccaaaagaccagtctgataatagttttgcaggtcattatgaccaagagacaaattttattacctgggaaataaggctgaatcccaagaaagaaaaatatactggtgatttgaagttggaaaatttaattccagaaggcttagttctagatccagatacgattgaagtaattaagaatgataattttattcaaaattctagtttagttaaattgaagaaaaacaaattaacagctgaatttcctgctaagaagtattcagagagcacaattttgattaagtatcgaaccaaggtggaagcagagcctaatgagcctaattatcttcgggtgagtcagtcctttactttgggcgatgatcgagttcaagaatacgagcaagaaattaaatacgatcgaagtaataagaattttaacattgaagcgccacataaatctacgtttagagatgataatcaaatttcgttaattaaaaaatctaaaagtaatgaagaacgctctgaagattggcttaaacgtctagcagagctgattattaataaaaaagaaactacttcagataaaggaggtgaaaaagttcaaggacaggtcaaagatcaaaagcagcaagcttccccagaaaatacaaacctttcacgcactccaactgtcaaaggcttgactggttttgatactaaggctaacgaggtaaaatccacagctaaaatagattctgattcagtaaaaactactctagataaagacgagattaaggacaatgcaagtactatctcgcctaagtcgcaaaaacacgatactcatgtcacactccctaaaagtgacacatcagaaactaaggcaaaattacctaaagctggtgaaactgccggtgttatgctcagcgtatttggcataattttaataattgcagggtggacagttcgaacaaaattcttaaaataatctatatttgtactaaaatacggattttcaatagccaaaatagactctttcacgtattatttagatagataaacttgtatcatgaaagagaaacaaacatgccgtacactatttcagaaattattgttttattttttacttattcagttatcggctggctttgggaaaccttttattgttcgatcaaagaccaccattatgattatcggggatttctgtttggtccttactgccccgtatatgggttcgccgttactacaattttaatttgtaccaaagacgtgcgagataacctgctccttttatttatagtagggactatcgttgccactattttcgaatttgtggctagttggctattagagacaatctttcacatgaagctttggaattattcaaaattatggggtaacattcaaggtcgagtggccccaatgatttcattattttggggcgttggtgtagttttattagtaaaatttattcagccaatcattcagaagctcattaataatgaagaaaagataactcatggctggctagctgtgggtattaccattgttatgggtattgacttagtattaacagtaatcagtgtcgagagattccatactacaactaagatgtgggatgtgcatgttaaccactttattgagcgagttagaactaaagtagaaagtcatatgcctgagaaaggaaaattgcgggttggtgattggcaccactcagtgatgcagcactatgatgaattacaaccgcaacgattaagctggaatcataagcgctacttgaagagctttccaaaattaaaagttactgatgctcctaagttcatggaaattaagaaagaagtcttgaagaaagaaagctaactaacataatcttattttgtgggattgaaaaaagtcggatgatcatattaggtcatccgactttttcttatccattaattctatttggttcacgttttttactttttatttcggtgtagttatctaaaacgttggcatagcgtccaagggtgaaaaggtaatcagataatcgattgaggtattttaatacgtcatctgataattcctgttcatttaaacttaatttgaccaatataatagcaacaccatcaactcctgaaactactgaagaagaacatctgacagtaaaagatcatgtgggttcatcaactttaagaagaggattaccacaaactggtgaaaagaaatctactttgaatgcaggctttgcccttgctggcataggcttggctttgcttgcagggatgttgtttgatcctaaaaagaagcactaatactgaataagaattaagttcgttaaagatcgaatcattttgggttcgatcttttttagtaacaaaatttaaaaaatcccaccttcgtgaataattgaatactttatatatttcaatcgtccactttagtgggattgtattaattcaggatgatctttttgaatttcctgtttttgaagggcagaccaagtccatggaagagttttttagtcgcctagaaactataggcaaggcttggcataaagcctatgataccattgattccgatacagatagagtcattaagagaactaaaatggatgctcgtactacgttagacctactagaacatctatcacctgtacagttctcttgaagagaaaaagaatatcagcacgtcaccagtatggttcttagactatgatcaaaaaatttattgtactgatgatgccatcattggtcagatgcttcaaaccattaatcatgacattacccgacgcagcagtcgtagcttattacactggaaaattcttaaacaaaattgttccagaaatttttatttttgatggatattattttttgcttggttctaagcgattttatttatcaaagttaatagttctatgttatattataagtgttataataatgtaaaaattattaagcattgaaatatagtgcattatgatacgaggagaaagatcatgttagaaagagtcccaaaatatacactaagaaaactgtcagttggcttggcctcagtgatgattggatcaggaatactgatgaactctccaaaggtacttgctgatactattaacccaaatgaaggtactagtactgctgttcaaccttctagtcaagataaagataatagtgagccaagtactcaatctggtgctactcaagatgaaaacattgattctaacgcagctgttcaagagagaagcgacaactcagttactgaaccagcaaccacaactaatgctgaagaaaaagtagtggcaacaaatacccaagatactacgcaagataaagacaagcagacaaatgcgaatgaaactacgcaaaatactaccaatgtcgacaaaaaagatactgaagtaacgccgactaacgacgcaacaacagctacaccgaagacaaccgccaaggttaacgcaccggctgcaccaacagcaatgaaggcagcagctactgctgaaacaccagatccaacggttccagataactcagctaatactgctattatcaatgacaagaatagtttggaaaaaatttggcttgaaacatctactgcgcgggcccaggtctacactaccgttaagggaactgatcaaaaaatctatgtcagttcctatgcagaattcggtaagcgacttaattcattaatttttactaatcgctttgatccaaatagtctagaattacacattgaatatcaggtgttaaaggatagggttcaaaatttcattgtaaattggggagactggctccgactagataccagtagaattggtaaagatggtctaactttcactacagatacaggtgaaaaagtagcctatacgttaacaccaggatgggggaagtacaaaacctatgatgaatggcttagtgaaggccaagatatgagtaagataaatgctcttaaaattggcaacaatttaaaggccgggactaacttcgtattaaccgttcccctaaaatatattggtagaactgatggcacaaagcaatttaacaatgttcaagttgtagattacgggcagccaaatgctaatatggtgttcgattttattgaattacatccagagcaaatcgatactccagaagctccaactactgataaagagtcagttactaccggtatctataacaatccgttagctactgctacagactggtataaaacggagcatggtgaatatgttgcatactatacagctaaagggaaagatggtaagacctatgtaactggatatgtggctgccaatggtaagtctgagtcgattatcaatgttgatcagattgatctaaataccttggaataccatatgatttaccgtaatggtgacgaagaagtagcggccggtatttcagcaagctttgctgatggtaagactctagtggttgatgctagtcgtataggtgctgatggtatccgtttgaagagtcaacagggttggtcttataacaacgggggttatagagagaatactagtgggagactctattatagttgggaagattttcttaagaaccataacggatcggtagataacctcgttggcatcaatatgaatgcatccgctttcaagccgggcgatacaattgaagtagttgttcctgttaggtatattgggaaactttctgatcaagttcaatccttagaatttaaatctgaagctagaaaagatgtttcggttaaactctacttcacaactgtgcgcaaggacttaagccaggttaagcaggtagtcttgcttccgactgagttcatgggagaacaacctggtcaatcaaactggaagctggttaaggaaattgaaaaagatatgccaaatgggtgggaggccattaaaattagtaacttcccaacctataagggatcattcaatatggattcactaccaaaaggggacttaccatcggttgtttatggctctgcgcaatactttgttgacctccaagaaattcagaaaatttttgctaaccatggttacacggtcaagtatgctaacaacaacggtaaagctcaggaaatgccattctatggatacgttaccctgccactggcccttattgatggtggtggtaaacctgttgccccatctatctggacaatccaagttcaagctgtgcctgctattattttaaataaagatcaacactatgtggcagatccgaatgctaagccatgggacaccacttcaatgattgatgagatttatgctgctgatgacgcaggacagcggaagacgcgcgatcaactagaaaagttgccaaagacggacgtggatattagttatgaataccaagctccaggggctgctacagctgctccggttgataaggtcgacttgactaaggcgggggtatacactgtcacttacagtcatacttatgctgatgggcgagtagttaaggatagtcgcaaggtttatgttgatgatgttaagcaagaaaccaaggacattactcgaacaattattgtccacgagccaaacggaactgaccaaacagttatccaaaaagcaacattgacacggaaagtaattcttgatgcaactactggggaaatcaaatctgtgggtggatggtctactgctaagtgggaaagatactcagctccagaatttaaaggttacactccagccccggctcaaattgatgaaactgctgtgaacaaggacactcaggatacaactgttgagatgtgtctgggaaaaaactagcttccagatgaataaaaacgatcaagatttccttttttaagaatcttgatcgtttttttgttctctttaaaatttttaacaataaaaatcggcccttcagccaccttctttgacaatatttgttcaaattcatcatcataaaggcaattccgatatcggtttcgaccttctctttacctcgcaggtgcgttctgcgcatgccaaatacgttcttcaaatgtccgaaaactggctctacatcatattttctcatgccatagatgtgtctgccttcttcgctttggagaacttcttttgctttttcttttaaatattgccagttaggattatagcgaacttggcgctggcggccgctagctgttttagccaattgttccaattctggcgttagctggaactcgtctgcctcataaaccttaaaatcacggacctgaccagtagaacgatccttgcgctggctgtaatatttgaaattgaatctgacgccatgatgatcaatgtaataatcatctttttcattgtagtaccagttgattagcttagttggatcattcttatactttttggtctgttctttttcatacatagtgtagggaataaagtacttcttgtctggatatttttcctccagcatcgaataattgtattcactgccatagccagcatcggcgacgattttgtcaaacttgtccaacacggtcatttgatccaaaaccggctccaaagttttgaaatctgtcggattaggaaagatggcataatcaactacatattgatcggtcgtgactgcttgaatattgtagccaggctttaattgaccatttttcatgtggtcttccttcatatgcataaaggtggcgtcatgatctgttttggaataactgttgcgtccggcaaagatctcttcggcttcttcatatttttgcattcttggcacataatcttttcttagccggtgcagaatcttttttagtccacgtcgcttggcttttcgaggtgaaccgccaggaatggctttgttttcctgctcaatctctttagtcagcttgttaatttctgcttcagtttcttgagctaattcctttagcccctgactagtttgaactttttctttttccatttctttgactacttctttagtaatcaattcatcataaagttcaactgcctggcctttcagcttttcatgatacttttcaaccgctttgcgccagacaaatgtatagcggttagcatcagcttcaatcttagtaccatcgataaaagcagcaccttcattgattaagccttcatcttctaacaggttagtgaagtagataaagctctttttaatcagttcattggcatggctgcttgatctaaaattattgatagtatgatatgaaatcttttgctggtcagccaagatcatcattggcagattttcttccagcatcaactcaatctttctgccagaaaaaactcttctggagtaagcaaaaagcagtattttgagcatcatggctggatgataggctgggcggcccgttttagcagtcttgcctactaaaacatcttctggaattgaatctacaaaccagctgatgacattagccaaatgattggccggaatggcaaaatctagattaagtgttaaagcagtttgacctgtgatataattcttgtacatgttagtttccaccttttttattttgtgatgatttaataatatcaaggctggagctaaaagtatacaaaaagagcgttgaaacaaaaattcaacgttcttttttcatgatctgagacttagttttttcccagacacatgagatcacaaagccagaaaccaaggacattactcgaacaattattgtccacgagccaaacggaactgaccaaaaagttatccaaaaagcaacattgacacgggaagtgattctttatgcacctactgggaaaatcaaatctgtgggtgaatggtctactgctaagtgggaaagatactcagctccagaatttgaagattacactccagccccagctcaaattgatgaaactgctgtgaacaaggacactcaggatacaactgttgagattagctatacagctaatgagatcacaaagccagaaaccaaggacattactcgaacaattattgtccacacgccaagcggaactgaccaaaaagttatccaaaaagcaacattgacacgggaagtgattctttatgcacctactgggaaaatcaaatctgtgggtgaatggtctactgctaagtgggaaagatactcagctccagaatttaaaggttacactccagccccagctcaaattgatgaaactactgtgaacgagaacactcaggatacaactgttgagattagctatacagctaatgagaccccagagcaaccagataacagcaaggacaaaggtaataatgacaacaatggtggtaacaattcagatgcgattgtgccaataaatcctagtgacaataactcaaataattcaaataatgcaccaactgacaataagaagactgatgacaccaagaaagataatactggcaagaagattacaaaggagactcctaagaaggtaaagaataataagtctaacaagaccaaatcaacgactacttctaaatctaaccagtcttcaaaggctaagcgaaccactaaatctggtacgattagtcctaaggcagtcgctttagctaatactactgctggtctagctacttcagctaaggcaaatatggaaaacggtattgccaagaacaacagccaaaattctcaaactttgccacagactggtgaaaatgaaagtaaggtagcatttgccgttgccgggttgttagcagctgctttgggcatttttggtatagctattaatcataaaaaagaaaattaattagctaagttgaataaatcatacaaaaagacgcatagaatagcaatgtcattaagttaagacattgacgaaaatcagactttatgaaccgaattattttggctctttgtcaaacaccctaaagtataaaggtagatagaaacatgacgatgtttttatctaccttttttcttatacttagattgagcttgcggttgaacccttcaaggcagccgttagaataaggcagttttgctccattaagcacagcttttaggttatgtttaaaggtcaatagtgttttgtgcattaaagtcccaatttgatcttggcagttgattaataagttgagctcatgagtattgcccgtttcaacggcttgaataaagctttgcatcaggttatatgaattctctaaggtagtgctggtattgatgccttctgtaactacttgtgcttgagttaagcagtctttgtagtgccagttatagtgaggatgaactttttcaagttcatcaaacttcttcaagtataatttccaaggagacttaagcagctgatattgccgcgatcttttatcaaaggtcttcatgacttggaacctcagcgagttgaatgagcgcgtaagcatttgaatcatgtgaaaacgatcaatgacaatctgtgcattaggaaaacaagctctaacgatatcttgatagtaaaaattaagatccatcgtgaccgttttaacgttagctctagcttggagcgagaaacgaccaaaatacttaagcagcgtcttcttgtagcgagttctaagaatctgaacgacttgatgattatcaccatccaggcagataaagtgcagctggcggtaactcatcaaaagctaaatgagctggcaaatattcgtagctgtcaataaaccggtgtgaacagttgcccagtactctttgaacagtattaattgaaatattgttttctctggcaatgctggtcatagatcgatcttcagttaaagctgacaacactttaagcttagaggcattagaaatagaacagtatttaccaattcagactgagccatagatcagcgctcacaagtgcgacatttaactcgttgcttagctaatcttataatgaccggtaagcttgcattagctgtcggatagtgaatgttggtaatcaaatggccattatgtaagagatctagggagccgcagaaaggacaagcaggttgaagcaattcagcttcatagattttatgcttttgcagtttgatcgatttatagaaatcacctttatttataagaatttgtgtggaaacgatttttattgaagaggactatgtcctcttttttgcaataaaaaatcctgttaacagcttatcatatagataagtcatcaacaggaaaaattatagagccaatattttgagattaattgataggggttgaaaagtaaattttatttgttatagaaaatatagaaaaaggattgttcaagaaattattttacgaaacctgcagtgaaccaagtgttggcactaggcttaagtgaccagccagtgaccttcttgttaacagcagtgattgagtattggttggtagttggcacaacgtatgcttcatcatacatccacttttgccacttcttgaaggcattagcacggtaagtaggattgaaggccttctctgagtcgatatcagccaaaagcttagtttgcttaggtgaaacgaaacgagcaaagttgtatggtgcagcttcattgtaaaggtcgttaggggatggttcacttgaaagtgaccaaccaccttcgaagacgtcgattcttggatcgtcagattgaacagcttgtacccagttgttgaattccattggacggccgccgacaaatttaacatccaaaccaactttcttccattgttggatgtagtttctccaaacaggttcagcggtagttgagttgtttctaacagccaagttaattactaacttcttgccgttaggttgaactctgtattcacccttcttcttgtagccggctttatccaataattcgttagccttcttcaagttgtatgggtaacccttgattgacttgtcagtataatcaccaaattgttcagggatcaaagtgttaacgcggaaggccaagccgtggtagtaacgtttagcgactgcatcaacgttcattgcataagccattgccttacgcaatgatggattgtccatcttggagttcttgttttcaacgttcttgccagacttcttatcccatttacctaccttaaagcctaagtagttgtaggataggggaaccttaccaatgaagttggtatcagtagcgttcttaacatcatcccattgggtgttaactacgccagctatgtcgaacttgtgactcttgatggcttgagtaactgagttggtaccgatgactgtcatggataccttttccaagtttggtgtaccacgccagtaatgcgggttacgttcccaagtgacagattgaccacgaacaagcttgcttacgcggaatgggccgtagaagagtggttgttttctaaccttgtcactagacatcaacttggagaatggtacgtcctttaagtaatggtaaggttcagcgtattcccagaagtaaccgttacctgattgaagcataccaggcttcatttgtttcgaccttgcggccatcttcgccatcaggcatctcaataccagaaatcttcttgctcttgccttcgtgatattctgctaaaccaacaatgtcggcaagagaatcggtataacgttgtgacttggagtctttattagcgataatttcataagcgtattccacgtctttagcattaacttgcttgccgtctgaccacttaacacccttcttaacctcgatagttacggtcttggctttacggtcaagcttaaaggtagcagcacctttattgttaatcttgtattgatcgttgactgagaataactcttcttgtcctggctctgcaacttcagtgtcagtggcagtatcagataattctggcaagaaaataccagtgaagggactatcagattcgatagcataatttaaagtgccaccttttttaacacttttcacaggaacagtttgactgaatttgtgatgtgtttcatctgcattattattttttgaatttttattattaccacaggcaaccaaacttaaagctgccccagaaacaagtgctaatgcaccaaaatatcgttttgctttactcattcaaaaagcacctccaaataaattaaaaatatttgagttttattctatgatattaaaatgaaaaaaatagaaaaatgaataaaaatgtgaaaaatattatttttaaattatttttgaagctaagattagttttctttcttggctaattaggcatagaataaggaaataacagctttttatgttggaggaaaatatggatacagcctggcaaaaatttaaaaataatattccattacgtcgatttgtggtactgctattaattattgcctgcctttatgaaatacgagcaatgatgaacacagtattattaacttttatttttacttatgtgattgtgcatttaattcatctagtgcagcggtattttcctaaaataccaacaggtctaattgttgcggtaacatatctaattatcttggcgctgctttatttcgtggttaccatttatttgcccatgttagttggccaaatatctaaaatggtaaagtcagtgatggcgttttatgaatcaaatgaatcatcgcgcttagccagccatgtaacgcgttatatcagtaaaggtgagattgttacgcaggcaaaacgagttgggacttttgctctgcatacggtgaccaattttggtagtttaacaattgctacctttatgtccttgattttaagtttcttctatacgattgaattagatagaatgattgaattttcaaagttatttgttaaaagtggttactttaaatggctttttgaggatattcgctattttggtaaaaagtttaccaatacttttggtgtcgttttagaggcgcaattctttattgccatttgtaatacggccttgacgatgattggtctggcatttatgcatatgccgcaaattattgccttaggcttaatggtctttattttaagtttagtgccggtagctggtgtgatcatttctttgattccattaagtattatcggctattctgttggtggcattcgttatgtgatttatatcttcattatgatcatgattattcatgcaattgaggcctatgtgttgaatcccaaatttatggctagcaagaccgaattaccgatcttttatacttttttagttttgttagtagctgaacacttctggggtacttggggcctgattgtcggtgtgccgatcttcactttcttgcttgatgtcttagggattaaatcggcgaagaaaagtaaaaagaaagcgagtaaataattgagagtacttttgacaggtgatagcattattgcacgccaggaaggaaaaaatgaaccgcaccttaattggaatttacaacagcttttgcctgagattgaactagaaaatacggctgtttcgggaattaattctggggcattttttgccaaattaaatgaattagtactaagcgtaaagcagtgcgataatttggtgatcttgctgggaaccaatgatttggctatgcacaaacaagtgccagcgaggcaatttaagcaaaatatggaaattatttcctcggcaataatttgtcaatattacccaccacatgttctgcttgtttcgccgccagctgttgatgaagctaagcaacgtgtacggaataatacgttagtagcggaatatgctcagatcgtgaaagaagtagcacatgagtatcattttcgttatgcagatctggcacaagctatgcgggatattggcgatttaagcgagatttgtcaaggagtaaaaaacgatggacttcattttggtgatcgtggctatgagattttaggaaaactaatcgctgaaaatttgaaacaaatgtaaaaaggaccgcaaattgcggtcctttatttttcgctattttaatgttgcccaaagcaagcttccagctagcgcaatggccaagaacggaatgagcaaataggcaaaaaagaaaaacataattcctacgactagtaaaaagccgataattttaatgaggccaattcctaatttaaaaaatagccagagtaagagtaatgttaataataaagaaagcatattaatacctccataaatctatgagagtattttactaccaaattggacgaatagaatagtaggaagattaatgctttagaaaaatttagttaccggtaacaagataaatcatattgaaagctctttctgtaaccgctatattttaactattgaaagcgatttaagaaacgagaggaaaaataaatggaggagaaaaaaactgggttacctacgctagctagtacgacaatttggatgattagtttggggtatttgggtgtgcaaatcgcctttactttggaaacatcacagatgagtcgaatcttccaaacattgggtgctgatccgacaaaattaggctggttctttattttaccgccgttagctggattggtagtgcaacctggaattggatcattatccgatcgaacttggattcctaagattggacggcgtttgccatatttattagtcggtatgatctttgccgtaattactatgattttgttaccaaatgttggtagttttggtctaggctatggttcaattgaggctctaatatttggtgctgttgcaatcgcgatattagacgtggcatcgaacatggcgatgcagccatttaagatgatgatcggtgatatggttaatgatgaacaaaagtcatacgcttacgggattcaaagcatgttgtccaactttggtgcggtaattgcggcctttttcccattcttattaactagtttgggtgtagccaatactgctaaaaaaggtgtggtaccacaatcagtagttatttcattctacgttggtgctgctgttttagtaattacttcactctttactatttttagagtacatgaatatgatccagaaacatatgcgcgctaccacgggattaaagaatctgataacaaagaaggtggcggctggattgaattgttaaagaaggcgccaaaggtcttctggcaagtatccttagtgcagttcttctgctggatttcattccagtatttatcaacttacgccactggtgcgattgcgcaaaatgtttggcacaccaccaacgcttcttctgctggctaccagattgccggtaactggtttggtgttttgactgcagtgcaatcaattgcggcggtaatttggtcctatgttttggctaaggtgccaaacaatcaccataaattgggttatggccttagtttattcttaggcggggtaggttatacttcaatcttcttgattcattcacaaagtcttttgattttagcatttatcttgattggtatcagctgggccggaatgaatacctacccattaaccatggtatctaacgccttatcaggtaagcacatgggaacttacttaggtttattcaattgttcaatttgtttacctcaaattgtggcatcactgctcagtttcttaattttcccaatggtcggcaattccatgccagccatgatgttaatcactggtatttcaggcttcttgggagctttatcagtcttagcaattaaggaaacctacgtaaaatagaatatcttctcattaaaaaacacactacaatgtgcaattatgcatgtagtgtgttttgtgatttatctatgtagaaaaattcgccttcgtctttgaacattttgtaggtttctttgatcattctttcagggattgcataagattggacgaatgcaattgggtcatagaaattatcttcttgtccgcaagagtattgatagatcagatgcaatccataaatatcggcatctctttcttcgtcatcaaggccgccataatcaagacaacaattatattgttttaagttgggcctgcaatccatgatatgcccaatttcatgagcaactgtaaatggtacttccggtgaatggtggtgccaattcatgttgatacagatttctcgctcatttttaaatgaaagagagggattattgggatctgattcaaaaaagacgtaaccaatatcatgctcataagcataattaaataaatacgtgattagttgattttttctatagttattgtccactgccatgttttctagcttctctctctttgatgtctctcttcatgagttctcggaccatgtcaagatattctttaggaacaggatgaccatagtatgaatagggcacctcgtcttccaaattcacagtgtcctgcaaacgtggagcagggtcatcggtaatgccacttaaatagtctattgatgtatgcaaaaccttagcaactgcacctaaggccataataccaggttttctggttttccaattgtagatacttcttttgcctagtccagctttgtcatttacttctagtaaagacatttttctttttttcgctaattcttttgtacgctcaaactcaatcatgacgaggttttcttcactttctaaataaaaaagtatgctaaaaagcatattttaacttgacatagtattcgtataagcatattatatgaactgtcaacaagttaaaaacaatctaatgaccagaaaaattctatgtggtagtggaatcaacggcactagtctgttttttatacccttattgtagtatattgacgtattttggtcaatgactaatatgtcaatacttaaattaggcctgcttgttgaacattatcaaacagaggtgaagtccaatggacattcgttaaccccctctgatcatttgatcaaaagagaggtgatttatttaatcatggatattcatgattacgtcgagctgattactttggctttatgggtaattagcgtagtaggtattggcatcttgagcagggttcattttaagaacaagcgcttagagcaattccgcaatactgcagacaacttgatgaaaagctatgtacgcttatacgacaaggaaaatctttctgacgaacagaagattaatcgcgttggcaatgcagtagtgaacagtcttgaggcaaaaggcttcaagctgaacaagcaagaagtgcaggatatctttgcggaagtagctaagcaaatggatgagcagactcaggataagtagtaataatttttaatttttcggaggttttgttatgtacgaaacatcaaatatttcaaataatggtgagttttcattaagtattggtcatcattcagttgtccaaaaaggagatgtaggtcaaaactatatttacgctttgcagttacgtgataatcaaaagagtacttacgtcttacgtagaagtaaaaatggtggtaattttaacactattttagatttacacggttcagcagctggtcatacgcagacttggtcctatgcaggtcctaataattggtttattggaactaagccgagtggaagctgggctattcaaattgctcgtgtaaatattaagactaatggtggtcgtcatactacacactatgattttccacgtttagctcacttagatcgtgccggtaatgtaccatatactggtagtttagtacgagcagaggcagcggtttctccagatcacactaagttcttattggttacagttgataacaatggtaagggatattttactatttataatctggctgctattaatgatgcacttgatagcgtgcaatataatagtggtgcacagcgttattatgatattggtaaaatttcagaatctgatgttgtaaataagtttactattgatagattgtattcaggtgacgttaatgataagagctatattttacattcgcttcaaggctttgatgtagataacaatttaaatgtatttatttcaagtcaaaaagctccaattattgattcagcaacaggtagattcccagcaggaaatacatttcataaagaaattttggttattcccgctaatgctagagatgatcaaaatcaatggactaatgtaaatctaagcgcttctggggtaattgataaaccaggaactggtcgacacactgaagttgaaggtattcaagcaatcgatgctaataatgcatatttaactgttgcatatcatattaaaaaatatgattctttagctggtgaatataagtcatacactgattacagtacaatttataaattgtcatggtattaattaagcgcataaagttggataaaaaatcctaaaaagaagatcgaatgttactgcaagatgtaatattcgattttttgtgttttcaaattaatttatgtaaacttataaaactctaattaacgtaagggggtataattgcagtgtgagaattaaaaaggatgattatgatgaagaaaaataaaattgcattaatttctgcagctgcattgatagccgttacacctttaacggtttggactactcaacctaatgaagtacaggccgcaggcacttcaattagaaagactattatgcatactgcaattggttatgatacaaatggtaggaactcgggcataaaactttatccatataaagttattaacgttgaccagattcctgtccgtattaatgaccaacaatattacaaagtaactggtaaatacttatatataaagcctacaaatatcgatggcgtaacacgaaaaattactcataacacttatatttatagtagctctactaaacgcactttttttaacggaagacgaaaattaaataaaggtgaaactattactacatatggtagttcttacaaatttaaagatggaaaaagttactttagaataggcggcccaagcaagcaatatgttaaagcagctaacttaagttcagtaattaaaagcaatactgcttcaggatcaactgatgtaaataggcactatgccaaagaaactatagtaacagttcatgttagaagcacatataagaagacagcaccaatatttacttttgatgaaaatactactgctgagaataaggctgtgattgtaaaaagagttccaaatggtactaagtttacagttgatcggctagaatatggcaaaagagctgacatggtagcagccaaaatagcatcattcaatggaaatcaggctatttatcatattaaaggtactaataattggatttattcaattgatgttgatcctgagaaacagttgttagagcaatattacaacaaataaattttaatttcagttaaaatgtcaaattaagcaaaaagagaatcctgttccgttgagcagggttctctttttggatattcattagtaaattgtttattttttgatctagaagaattagtcttttacaacatccttaatgttcaaccattggctcttgttgatcttaacgatcttcttgccatcagcctttttgacatctttggcagtgtaggttgaacccatagaaactttttgagtagttttgtgaccttgagcattcaaaacgttaactttttgatttttggtgtctttaacagtaacaaaaatcttgtcacccttcttgattgaaggatcggttggcataacttgtgcagttccaagcttaggagcttcaaaactagcagcttgactaactgaagcaccaacgctcattaaacccattgaagcaacgacaactgaaacaaccttaatcattttctttgataacataatgaatacctcttatcacttatctactggaacttttcgttcctcattccgtacaattcttattatataacgcaaggggaaaagtacattttttaggaaaatatttttactgggtaaatgttactagaataacgttttacggaatttcgtaaaaagggcagaaaaaaacagctattcattttgaataactgcggagatttttggtataagtcccttaacgatgacctcggctcttattataataagaaaatccgcaaattcacagtgttcatattatagctgtcgttcactcttaacttataatcctaaaataacgttctaatctgtgaagtattgcagaatatcctcctcagttaggcgttttttgtcgtcgcctttgacatcaaaaacgattctaccattgtttaaaatgatagtgcggtttccgtatttgattgcgtcttttaattggtgagtgatcatgacacaggttaaatgctcttcttgcacaactttatcagttagttcaagcaattcgcggctagtatttggatctaacgccgcagtatgctcatctagtaagagtaaatcagggcgcttaattgtcgccattaaaaaacttaatgtttgtcgctgaccaccagaaagattacccacaaaagtatttaagcgttcatttaacccattagggagttgggccgcctggcgtttaaattcttgcatatgtttatctaggcctcttaaacgcagaccgcggtgttcacctcgtttggttgcaagtaataggttttctgcaacagtcattcgcggagctgtacccattttaggatcttggaatacttgggcaatatatttagcgcgttttacttcagaaagattggttaaatcttggtctttgagcagaatttttccgctagtaggaaaaatagagccattgataatatttagtagcgttgatttaccagcaccgttggttcctaaaagagtaacaaaatctccatcttcaagttttagattaatatttttgaggatttgcttttcttcattggtaccagcattaacggtagtggtaatattttgtaaatcaagaatagtactcatggtttttcaacgcctttctttaataatttacgagtgcgaaatttttgttcaaataaaggtagcatcatacaaatagcaagaataatagcggaaatcaacttaaagtcgttggtactaaagccaagttggaggactaggagtaagataaggcgataaataatactgccgataacaactgctaccaagcgggcggttaaacttaaattgccataaacgacttcaccaataatgatggcagctagtccgataaccatagtaccgatacccatattgacgtcggcgtagccaccattttgggctaaaaggccgccagctaagccaatcaagccattagagagcattagacctaagattttcatattatcggtattaatgccaagtgattgagccattttttcgttgtcaccagtggcaataaaggcttgaccaagatcagtatcaaggaaaactgctagcaaaacgatgacgataatggcaatgatcaaaccaacaacaatagtaggaaaattgatcggtaatttttgtaaaagctgaccgtttagtaaagtatttttgttaagtaaaccaacattagccttgcctagaattctaagattaactgagtagacgccagtcatcgttaaaataccagctaaaagaacaggaatttttcctttagtatatagtaagccggttactaagccagtgaccatgccagcgaagaaggaaagaatggtagctgctaaaggattgacgccatgaactaaagcactaacacaaattgcggcaccgaaggggaaggttccttcaacagtcatgtctgggaaatttaaaattctaaaagttaggtagaggcctaaggctaaaataccccagagtaagccttggccaatagaagaagtaattaagctcatttgataattcgtcctttcttttgggcagcttgaattacactgttaggaatagtgatgtttaattcatgtgctgctttttcattgattactgtttcataatgggttacgcgtctgactggaagagcagcagggtttttaccatgtaaaatttgtcctgccatttgtccagttaagattcccatgtcgaattgactgacacacctggtagcgagaccaccacttttaaccatagtatcggcagcaggaaaaactgggatcttggcactgttagtagcctttaataaggtggcaattccactagctacagtattgtcggttgggacataaactgcttgaaccttgcctaccatggtttgggcaacttgttcgatatcattggttgaagtgatagtgtaagggataactttaagtcctgttgcttcagctagtcgtctgaattcacggtactctgatgctgatgaatcatcacttgaggtgtaaatgacaccgatgtttttggctttaggtagaatttcttgcattaaggccagctggctggcgattggctggcggtcctggacaccggtaattttaccgccgggatgcgctaggctttttactaaatgggccccaagaggatcgctgaccgcgcccataactacagggatgttgccagaagtattagctagagattggacagcaggagtggcaattccaatagttacagtcgcattttcctggctaaaacgatcgctcattgatttcagattactttgatcaccttgggcattttgaaaatcaattttaagattttttcctttgacatagccttcatctttgagaccctgaataattcctcgatgaatctgatctagagcggggtggctcattgtttgcaagataccgacagttggcgttttcttttccgcatttttcttatttacttcactgacaaatgcaactgccagaaaagcaaaaagagcaataattgttccgattaaccttttcattctttttctccttcaaacaaaaaaggcacttccttttttcgggaaatgcctaaaacaaaacccgcacgttattttccgtgcgagcaatatttcttgaagattttaccagcacagatacgatcttaatgagtcgcatctgtacttcacgaacagaaacaactctagtgctggaattgccaacgattgattgctgtaaatttaatcatgataaaatcttcctttcgttcaaatttgttagctaaattttaagtaattatgagaaagatgtcaaatgattttttgttagatttatttagttttgaataatttttaaaatgctataataattattccggcaaccatcataaaaagaagggaggaattctcttgcgctatcaacaaataatttttgatgtagatgacacaattatcgattttgcggcaactgaagattttgctttacatagcttgtttaacgctcatcactggcctttatctgcggaattgcagcggcagtatcattcttataatcaaggactttggcgccaacttgaacaaggtgaactaacttatgaagagttaagtgaaatgacttttcatgattttattttggatcattttggcattgagattgatggcaagaaggcaatggatgaatatcgttcatactttggtgaagcacaccaattattgcctggggttgaagatacgttgaaatttgctaaaaagcagggctataagctgaccgttttgagcaatggtgaaaaatttatgcaaaatcaccggttggagcttgctggggtgaaaaaatattttgacttaattgttacgtcagaggaagcccattattctaagcctaatcttcatgcctttgactatttcttcagtcgaactgagatcggtcctagtgagacagtcttttttggggacggcctacaatctgatattttaggtgcagaaaaatatggctttgatagtatttggtacaatcatcgccatcgtaaaaataccttgcatttgcatcctaagtttgtagtagaaacttatccagaattggttaaattaatgcagaatgattttgagaagaagtactaatcattatactttttgctcttcaagaagatgccccaaccaatagttaataagctgacaaaaattattaaaatccaaaagccgttttcattttctttacctggtaagccgccgacattcatgccccaaatgccactgattaaagcgggaagagcaattaccagggcagctgaatctagatatttcattaaatgatttaggtgactgtccatcatggcggtaaagaggccgctaatggaattgagcaagtcagtgtaaacgtgaatcattttggtaattcgtttttgcttggtcatgatacttttgacgcgggcttgatttgctagcttgttttctactaaataattaccaaattcttctagactaggtgtttgatcatctaaggtatgctttaagtaaactagctggcgagttaaatctgttacttttttaattctttggtcttagttgttcttcttgcagcttgatctaaatggtcaattttttgtttaattgttactaattctgcatgaagatgcttgatttggatacacaggctttgaaaaattgtttcaataatattttcttgcggttttaattctgaaagacttcttgttgtgccaataaagagatgattttggtcaaaaattgtaaaaattggaattagctcttgttcaattggcaagtcattacttaatagatcgaaactcactaataagtgaccattttttagtttattagaatcaatagggataaaacgagcaacctcaatcgaggaattagggtaagtgaaaattgtaggatctagatcccattttttgattaaatgatcgatatcgttttgcgtcaattgatcttttaaaattatattctgactattagtaagcatatttgttcacctctgtttcttttttagtttaagattaacatgtaatgttttttagactgaattaagttgacttgaaaatatgtttttttaaaaaatatagaaaggtgagaatatggaattacattcacttactgatacttatactttgaacaacggcgtaaaaattcctgtaattggtttcggtacttggcaaacaccaagtggagaagttgcaagagaatctgttgaagccgcacttgaggcgggataccgtcacatagatactgctgcagcttacggcaatgaagaaagtgttggcgaagcaattaaacgtagtggcgttaaccgccatgaattatttgtaactactaaattgtggaattccgatcatggttatgacaagactaaaaaggcaattgatactagtctagaaaaattagatttagactatcttgatctttacttaatccattggcctaatcctgtagctatgcgtgacaactgggcagagcttaacgctgaaagttggcaggcgatggaagaagcagtgaaggctggcaagattcgcgcaattggtgtatccaactttagaaagcatcacctggatgaattaatgaagactgctgaaattaagccggtagttaaccaaagttacttgaatccgagtgatttgcaaccggaagtaacggccgcaagcaagggatatgatttgcttaatgaggcttacagtcctttgggtacaggtggtttattaggcaatgaggtagttaatgcagttgctgaaaactatggtaaatcaccagctcaaatcttgattcgctggtccttacaacatggctttttgccattgccgaagtcagttcatcctaagtatattgcggctaatggtgatgtctttgactttgagattagtccagaagacatgaagaagttagatggtttacgtggtgcaagtaagttggctaatgatccggatgaggttaacttttaatttaatttggaataaagaaaattgaattatcacaagaagtatcttatttttgaagtaagatacttttttattaggtgagacaatgaagaaaattacaacaggaattgtagctcacgttgacgcgggcaaaacgactctttctgaggctctgctgtacaaggcaggaaatttgcggacgctaggaagagtagacaatggggatgcttttttagatacagatcaattggagaaaaaacgtggcattaccattttttctcatgaagctaaattaacgactgatgatttagaaattacgttgttggacacaccgggacacgttgatttcagtgcacaaacagaagaaacgctgagtgtacttgattatgctatcttggttatttcaattacagatggtgtaactagttatactcgcactttgtggcatttgctcaagcgatatcaggtaccagtttttatttttgtgaataaggttgatgcgataggcgctgatcgagggatggcgttggttgatattcaaaagaacttaagtgagagttgcgttgatttttcgaagattgatgatgaattttatgaaaatgtggctgccacagatgatgccttgcttgagaagtatttggatagtggtgccatttatgatcaggacgtgcagaatgcaattgtgcagcggaaagtttttccaatttattttggttctgcgttgaaattaacgggaattacggaatttttagctggttttagtaaatggactaaggaaaaggaattctctgataagtttgcggcacggtgctttaagatttcgcatgatactaaaggtgaacgcttaacttggttgcgaattttgggtggtagcttaaaggcaaagactgagctagctggtgagaaaattaatcagctgcgtagttataatggtgaaaaatttgtaactattactgaagcagctgctggagagatcgttgctgcaacaggattgactaagacgtatccaggacaaggattcggcgtgggggatgcaccaactgcactgcttaagccagttttgacctataaagttaatccccaggataatgatcttcacgcttgcttaaaagctctgcaaaccttggaagatgaagatccacagctgcatgtgacttggtccgaacatttgcaagaaatccacgtgcaagtgatgggaaagattcaattagaaattttagaacagttaatgaaagaacgttttggtttgaatattgtttttgaacagggaagtattctttatcaagaaacaatcactaaaccaattgaagcagtaggccactttgaaccgctacgtcactacgcggaagttcatcttttactggagccactgccacgtaatagcggtattgtttttgaaaataaatgcagtttagaagttttgactaaaaattggcaacatcaaatcatgacggcattgaagtctaaagaacatcttggtgttttgacagcttcgccgattacagatatgaagattaccttgatcggtggtaaaggctcaattgtacattcggttggtggcgatttccgtgaagcaacttatcgtgcagtgcggcaaggtttaatggaaaaaaagatacgccaacaaactattttgctcgaaccgtggtatgatttccgcttagaaataggaaaagatcaggtagggcgtgctttaaatgatattcagcgcatgaatggaaaatttagtacgcctgaaaatattggtgaacgaacagtcatatccggttctgcaccggtagctgaaatgcaagattatgcgacagaagtgcgcaattatacgcatggtgaaggtaatcttgaatgcgtagtcagtggttatttgccttgtcacaatgcggcagaaattattgaggaaaagaattatgatcccgtttctgatctggagaatacgcctaactctgtcttttgttcacatggtgcaggtcacaccgtcacttgggataaggtgccagagactgcacaatatccttatacttatccattagattagcatgataccatgaattgtttatcttgttacatgtgaaacattaaaaatgcggcatagtgcttttcttattaaaaagtgcaacttgaaataagcgaaatatttgactagttatgaaagaaatttcattttattagcaaaatactgctagaaaatcgcttgcatagtaagataaaggtacgatagaaaggtgataaaacatgacacaaataccttttaaagctgtagcggttgatctagatggcacttttttgaccgaaaaaaagacttttgatcatgcgctatttgcaaaagttttacgaaaattgcaagctaatcaaataccgtttatctgtgcaacagggaaccaactaattcgttcgcatgaatattttgacgagtttactaatgaagtagattatgtgtctgaaaatggggcaattctagaagccgatggcaaagtatttaagcggattgcgattgactatgatactgcacaaaaattgttacattttattcaaacagaataccctgaagcaatcattatggttagcgcacagcatcattgctatattttgacgagtatggatcaagcggataaagacgacattagaatttattatcgtgatgttcaggaaatcgatcagtttactgacattgatccagccgatgcgatcttgaaggtttgtctgacagctgatgatgaactggcgcaggtgattcaggatcggtttaatgaaaaatatggtgactgtattcgcggcactagcagtggtaatatgacaatcgacttggtgcataaaggcattaataaggccaagggcgtagacgatatgcttaagcattatggcattgcgcaaaaagatttgattgcctttggcgatggcgaaaatgatattgatatgcttaaggcatgtggctatagttatgcgatgaaaaacgccaatgcgaaggctaaggcggtagcaaagtatgaagcgccaacgaatgatgaaaatggtgttttgaaagttttggctaagtatttagatattgattaatttaatacgcaaaaaagacttgagaagtaattttcccaagtcttttagtttgctttattaactgctctgaaaatattaagtccgctaattagaatgatgaatccacaagctaaaatcagaaccgtttcaccagagctgtctaacaaaattccggcaacaattgaactaatcggtccaccaatagaggtactggtacgaatagtagttagcactctgcctaatatttcatcgtccgcagtaatctgaatcaatgattctgccaaaatattgtgaatactcgtcattagcccaaataagaaaattagtcctgtgaatatcaaccaattgttactgaagaaaattatcaaaagtaatggtactgcactagctatccaagtaaaaccaattgtttttacccgtacggataatcttcctgcaatagttgcacctattacaaagccaatcataaaactgatatagaacatactgtatagtcccgcttgaccattttgttgagcaattcttggcaacagaatggccattgctggcgtcacaaaagaatacaggattgaggaccagaagtaatgacttaagaaataatttgttttaataaacttatagccattaagaatttgattgaggtattttgcctctgcttttttgactttaggtctatctttaatttcttttagggcgtaaaacagaaaaacaaaactgattaggctcagtagactgcagatcaacattacattagctgaaattaaaaaagttaataaaaatccagaaagagcagttcccgctacattcacaaactggtcgatgttgctaactttagaaattagattatttaattcttggtcatcagccgttgtttcttttaaaatagcccggtcagctggattaaaaaattcatcgcagacagatactattcctgcgcagattaatgccaaaatataacttttgctaagttggtaaactgcaattgttgtggcaaataggaaaacagtttgaacaagaattgaatagtaacttgtccttttgaatgaataatgatcgataatggggccgtagaatattgataaggcggcagtggtggaaaagatggcttccgcaattccgacgacaaaggaacttttggtggaagtttgcagccaccagataaagaccatgctgaagagggaattagctagtccgccaacggcacgcgagaaaaaatatgatttcttttttaacatttaaagggttcaccttactatcatttggtcaaaggtatcgtatccacaccatgaatatggatggtttctaataattttatctatttttttaaatacatatttagactcattaacaatgcttgctctgttttgaatttttgacggataaattggatcttcgaaagtgatcttgattttgtatttttctgtcatttcagtatgtaagataataattggaacttgcattttattgcttacccaagagctacctaatggcattgaaacacgtgctcctaataaatttacagtatgttgtggccctagtcccattgaaatttctggtggaattgctactactttgccttgtctgatgtcttttaacgcttttcttaatattaatgggtatggaacaccataactatcaacaagagactgtaaaatagtttgtgtaaggatgaatgattccttaaatttatttctttaaacattagaaaaaggagttcctttctcgtatgattggtttgaacaaaaaaacacatacagaaagaagaactccttcatgaatgattttaccaaagattttgctcaagctctattcaatccagacaaaataaatgatttattgcgcaaagagctacaacaggctgttaataacttgttagaagctgaattgactgcctttctgggctatgatccctatgccagaaatggctggaatactggcaactctagaaatggtgcttatttccgcaaagttgatacgcaatttggcccaattgaagtgcaagtgcctcgggatcgcaacggtcaatttcatcagcacacgctgcctggctacaagcagcactcggatatcttggaaagcatgattatcaagctttactccaagggcgtgaccaccagggaaatagccgatctaattgaaaagatgtatggcagccattacagtccagctcaggtatcaaatatttccaagcagatgattccaaaggttgaggcttaccacaaacgcaagctaagcgacaagtttttctgcgtctatttggatgcgacataccttcctttgcgccgagaaacatttgagcgtgaagcagtctatattgccattggcatcaagcctaatgggcacaaggaggtcattgactactgcattgcacctagcgagaacattgaagtctggacagatatgcttcaaaacatgaaatcccgaggcttaaagcaagttgagctttttctttctgatggtgttgttggcatgaaaacagccttggccaggacttatcctaaagctcattttcaacgctgtttggttcatgtcatgcgcaatatctgcgctaaagtacgcgtcgacgatcgtgaaaagatcatgaacgaattcaaacaggtgcatcaacagacaaacaaagaagaagccacagctgtcctgcatgacttctataccaaatggggcaaggtttacagccatgttatcagaagcttgaaagacatagaaccagatctgctggtcttttataactatcccaagcagatcagagcttcaatttattcgactaacatgattgaatcatttaacaatgtgatcaagcgcaaagctaagcctaaggcagagtttccaactgaacagtcgcttgatgcttttattggcattcaggcaatgagctacaatgaccgttatttcaatcgaattcataaaggctttggtcaggttcaggacaccttagaatcctactttgattaaataaataattaaaaaatcaatttacgagaaagaactatttacacaaaagatttgacagtttcgtagaaaatgaagccaaacttcttattatgcttgactttacgtagaaaaagacctaaaagtgtctaacttttaggtctcagttcagtgtcaaaaatgacacctttttttattttgaattaaagtttatcagcaattatatccattccattttctctgagaaaatttgatattgttttggctttctcaagtttattattgagaatagattcatagtaattagccattattttagcaaaacaatttttaggatcaattgttaaagaattcagtattttaactgaagcatctatattagtatttataatacgttgctttttttttatgaaataacttaaataattaactaagattgcggatattattttttgcttttcttcaggaagtgaatttatattatgggtgttctttataatattttttacaacagaatttatttcatttggatcaaaaatggacattgaaatagcaaatagtcttaagctattttccgtccaattatctgtttcgaatatagttttctttatgtattgtttttcatcattagaaatctgggctaaagtatttgaaattgctgcttttataataataatttgtgccctaatattatccaaatttagttcactattgtttctatcgtttagcattttttctaattctgttattttcgacaaatctttttgatagtaagctgtgtgtaataaattatcacaatcaattttagatatgtgatttttattagtattattttcaacctttttaaaaaaagaagagtaatcaatattatgcaaacttaaaatttgtaataaatcatttgctctaatactacaaatatcgcgttccactttagagtaaaatgatttagtgagtatgttgccagccattttactttgacttagatttaattgttttctttctaacttcaatgcctcgccaattttcattttctttcctccaatgtcggataatgactaaatcatcatttgctttctgatataaataaatttatgcaattgaaattttatgtcctgaaaagtatagggtaaattattcaaggagactgtaaaatagtttgtgtaaggatgaataattccttaaatttatttctttaaacattagaaaaaggagttcctttctcgtatgattggtttgaacaaaaaaacacatacagaaagaagaactccttcatgaatgattttaccaaagattttgctcaagctctattcaatccagacaaaataaatgatttattgcgcaaagagctacaacaggctgttaataacttgctagaagctgagttaactgcctttctaggctatgatccctatgccagaaatggctggaatactggcaattctagaaatggtgcttatttccgcaaggttgatacccagtttggaccaattgaagtgcaagtgcctcgagaccgcaacggtcagtttcatcagcacacgctgcctgactacaagcagcactctgatgttttggaaagcacgattatcaagctctactccaaaggcgtaactaccagagaaatcgctgacttgattgagaaaatgtatggcagtcattatagtccagctcaagtatcaaatatttccaagcagatgctccccaaggttgaggcttatcacaagcgcaagctaagcgacaagtttttctgtgtctatttggatgcgacataccttcctttgcgccgagaaacgtttgagcgtgaagcagtatatattgccattggcattaaacctaatggacataaggaagtcattgactactgcattgctcctagtgagaacattgaagtctggacagagatgcttcaaaacatgaagtccagaggcttgaagcaagttgaactctttctttctgatggtgttgttggcatgaaaacagccttggccaggacttatcctaaagctcattttcaacgctgcctggttcatgtcatgcgcaatatctgtgctaaagtccgggtggatgaccgcgaaaagatcatgaacgaattcaagcagatacatcaacagacaagcaaaaaagaagctgcagctgtcttgcacaaattctatgccagatggaataaagcttatagcaatgtcatcaaaggtttgaaggaaattgagcccgatctgctggtcttctacaattatcccaaacaaatcagagcttcaatttattcaaccaatatgattgaatcctttaacaacgtcatcaagcgtaaagctaagcctaaggcagaatttccaactgaacagtcgcttgatgcatttattggcatccaggcaatgagctacaatgaccgctatttcaaccgaattcataaaggctttggtcaggttcaggataccttagaatcctattttgattaaataaatgattaaaaaatcaatttacgagaaagaactatttacacaaaagatttgacagtttctattcaagaataagatactaaatatttagtatcttattttgcatacaattaggctgaaaaaacacaaaatactaatgttataattgattttagaacttaacaagaaattagggaacttttatgaaccaattatatcaagaaattaatgatgctttatatcatgtatattacgggattcagcggattgaagaagaagaactaaagaaaagtcgtttcaatgatcttactcctaaggaattgcatgcagtagatgctattactatgtatgaacatcctactacttcgcaagtagcagaaaaattgcatttgtcacgagctacaatgactgtgactgtcgatcggctagttagaaaaggctatgttgaacgaatccgaggtaagcaagatcgtcgtattgttcatttaaaattgacaatgcgaggcagagtagtgtgccgagcatatcatgcttatcataatcgaatggttaaaagttttttgcaaaatctagatgagaatgaattgcaaacaatttatcatgcatttaaaaatctagatgagtttttgaactcacactaatattattttgaaattgcttaagcagactggagatattcagtctgtttttttgtggacgaaaaaaatttaattacatagaagtgttcttagtattagtgtaaatagaatttttgagttctatatgaacttgtaatgtgttgacaataaaaaaagagatgataagatttgaatatcgaatagttagatatactaattttaaaaaaacgaacatggagatgaagttatgccaatgaatactgctgagattcaaagcaagttagattgtcaagctcccttgatgctgttagatcgagttacaactttgaataaagatcaacaagtaattgctcaaaagagtgtgagtgctaatgaatcttattttcaagggcactttcctgagaatccaataatgccaggtgtgctgctaattgaagccatggtggaggcaacacaatttatgtgggatcggtcagatttgattcttactagagttaaaagaggccgctttcgtgagatggtcaagccagggatgcagttgacaattaaggttaacgccattaaaaaatacgcatgtcaggcaaaggttttaattgatgataaagatgtttgtgtagcagacttggaatttaaggtaacagaagaaaattgaaagatgtaaaaattatagcaactggttttgctgtgcctgagcatgtcgttactaatgatgatctcagtaagatcttggatacttcagatgaatggattgttaaacgaacaggcattaaaaggcggcatattagtcaaaatgaaaatacttcggacttggcaactcgtgtagcaaaaacattattgagtcagagtaatgtaagaactcaagatattgatctgatagttgttgcgactatgacacctgataatatgacaccagctacggcagcgattgtccaaggcagaatcgctgccgaaaaggcggtatgttttgacatttcagcggcttgttcaggcttttcttatgctattagccttgctagaagcatgatgcttaccaataattggcgtcacgcaattgtaattggcgcggaggttttatctaaattgctagattggactgatcgctcaacggcagttttgtttggtgatggagctggtggcgttttattaagtcaaagtaatgccactcatttattgggacaaagtttaaaaacttatggtaataaaggtgatcaattaattgcaggtcatttagatgtttcttatgacattttgaaaaataaaaaaagctatcagcctttaccatgaatggacaagagatatatcgttttgctacgcatgaagtaccacggtcaattttgaaagcttgttcaaatgcacaaattgaacttgatcaaataaattattttcttttgcatcaagctaatagtcgaatcattactcaagttgctaaaaagttaaatcagcctttaagcaaatttggtgtaaatattgacgagtatggaaatacagcggctgctagtgaagcaattctgctggctgaaataattcagaaaaacagaattaagccaggcgaaatcattgctttaagtggctttggtggtggcttaacaacggctacattgattattaagtattaatacgaggagaataaaaaatgactaaaaaagaaattttaaaagatgtacaagaaattgcccaagatgaattagatgttgaaccggaaaaaatcacaatgactaccaacatcaaagaggatttagacgccgatagtctagacctttttgaaattttgaatgagttagaagataaatacgatcttgatttagatgctgatgagagcatccaaacaattggccaattagttgattttgtacaagcagaaatggataagcaaaaataatgagttacggtattctgtttagcggccaaggcgcgcaaaaagcgggaatgggacttgattttttagacgatgatctatttaaagaaacgattgaaaaagcaagtttagctagtcaggaagatttggttgccattcttagagatgaaaatggagaactagataaaacaattaatgttcaacctgctctagtagcctttgaaataggaatttttcgtatgcttaaaagagactgtccccatctaaatattagtagaatggttggtctgtctttaggcgaatatagcgcaatgtatgccagtggtagtctagatttagaaaataccctgagcttagtcagtgatcgggctcgttatatgcaagaagatgctgatcagattgaaaacggaatggcggctattttaaaacctaaactcaatgatattgaagttttaattcaaggcctgcaaaagcaaaacaaacgagtttatattgctaactacaattcgcctaaacaagtagttattgcaggtgaaaaatgtagcgttgcattagcttctaagcaaattaaagatcaagatttggctaagcgaattattatgctaaaagttaacggcgcctttcatacaccactatttaataatgcaaaaactaaaatgacgaagcgattagcaaatataaagtttcaagaaagtaaaactccggttatatctaatacaactgctctgccttttagtggaaattggcgtgagattatggctaagcaattaacagtccctacgcattttggctcatgtattcaatatttagttgaacatgagcaaattgatcaaactttagagattggtccaggcaaggtgttatcttcatttgctagacaagtagatcgtcacttaaagtgtagccatattggcaattatgcagaatatcagacttttgtagaggaagaacatggaattaaaggataaagttgtttttattacaggctcaactcaagggatcggcgcagcaatggcagttgcatttgccaggcaaggcgccaagcttattgtgaatgggcgaaaacaagagttgcctaaagatttaaaggatgcattggataaagagaatgctgattatcggtatttatcagcagatttagcacaggacaatttagaggagataggcaaaacagcctggaatttatttggtaagatagatgtcttgataaataatgcaggtcaagcaaaagataaaatgttcattggtatgcatgatgctgatttcgaagaggtattaaatttagatttgaaagtaccttttttcttgagtaaagcaattatgaaaaggatgaataaagagcgttccggggtcatcatcaatttatctagtgtagttggcttacatggcaatgtgggtcaagcaaattatgcagctgctaaggctggtctaattggttttacaaaatcaattgcacgtgagggagcgttaagaaatattcgagttaatgcgattgcaccaggaatgatagatactgaaatgacacaaaaattgtctgaacgtgttaagaaaaatattttggaacagatacctttaaaacgtttaggttcaactaatgaagttgctcaaggagcggttttcttagtgcaaaatgattatgtgacaggacagacaattgtaattgatggtggaatgaccatttaaagaggcaatatgcaaagagtagtaattacaggaatgggggccattgcccctaatggtaatggtgttgaaaattttgttcagaatactttagcaggcaaagttggcataaaaccaattacgaagtttgatgcatctgaaacaggaattagtgtagccggcgaaattgatgattatgacgaaaatgattatgttggcaaaagagaagcaagaagactagatttgtattctcaatatgctattcaagttgctaatgaagcgatggaaatggcagggattgatgaaaaaaatactgccccggaagatttaggcgtgatttttggatccggaattggtggattgactactattcaagagcaagtaattcgcatgcatgataagggacctaaaagagtatcaccactatttattccgatggtaattgctaatatggcagctggaaatatctctatccgttttaatgctaagaatatttcaacttcaattgtgactgcttgtgcttcaggaactaattcaattggtgaagcttatcgtcgaattaaagaaggtgatgcacaggtaataattactggtggatcagaggctactattaatgaaacagcaattgctggtttcgcagccttaacagctttatctactagtacggatcctgatcgagcatcactaccatttgatcaaaaccggaatggttttgtgatgggggaaggagctggagcactagttattgaaagtttagaacatgctcaaaatcacggtgccaaaattttaggcgaaattgttggctatggcacgactagtgatgcctatcatattacttctcctgatcctaaaggagttgaagcagctcgttcaatgaatcaagcaattgtacaggcaaatattgatcctagtcaagttggatatgttaatgcacatggtacagctacacatgctaatgatgctggagaaagcaaagcgattaaccaagtttttggaaaagatagttcagttttagttagttcaactaaaggaatgacaggtcatttattaggagctgcaggtgccattgaagctgtaattactgttgccagcttagaaaaaggaatcttaccaccaaatgttggttgttttaagcaagatccagaatgtgaagttaatctagttaataaagataatcaacagcaagatattgagtacgcaatttctaattcttttgggttcggtggacataatgccgttttagcttttaagaaatggagcgagaattaatggacttagaaaaaatacaagctttaatgaatcaatttgaagattcagatttacgtgaattgaaaattgatgatggtgatttccatttctatttaagtaaaaacaagaataaagttactcagacagtacagccgactgttcaaaagaccgctaaaaaagtggaagaaacagctcaacctgttgttcaagagaatattgacaccaaggttaaaccggttaaagcacctatcgttggagttgtttatttgcaggctaaacctggacaaccagcctttattaatgtgggcgatcatgttaagaaaggcgacacaatttgcgtgattgaggcgatgaaaatgatgacggaagttaaaagcactttaaccgggactgttagtgagataaaagttgaaaatgaagacctggtcgaagtagggcaacctttaattactgttaaggaagattaatttatgagtaaagaactagggattgacgaaattaaacaaattattcctcatcgttttcctatgctgttaatagatcgcgtcttgtttctaaaagttggtcaggaagctaaagcagttcataatgttagttttggtgaaagctttgttcaagcaagttcctctaaagatccagtttttccttctattttaattgttgaagccatggctcaaacaggtgcagttgcattattgagcaaggcagattttgccggcaaaaccgcgtattttggtggaattaaggaagcaaatttcattgttcaagcaaggccaggggatcagatagttttgacaacaaagttaactaaaatcagaaaaaatattggcattggcataggtgaagcgtgggtaggcaataagaaaattgcacaagcagaactaacgtttatgattggttaggtaaaatgaatgtttaaaaaagttttaatagcaaatcgtggtgaaattgctgtccgtattattcgttctttgaaggaaatggggattaaaacggttgccatttattcaactgcagatcgagaaagcttacatgttcaattagctgatgaagctgtttgcgttggtggcccgcaacctactgagtcatatttaaatattaaaaatattttagcagcagccgtaggcatcggggcacaagctattcatccgggatatggttttttatctgaaaatgcagaatttgctcaaatgtgtgaagattgtggcttaacttttatcggccccaaggcggaaacgattgatcaaatgggcaataaggaacatgcgcgtcaattgatgatggcacacaatgttcctgtaactccaggatctaatggagttattaaaaatgctgaagaagctaaaaaaattgctgctcaaattggttatccagttttgattaaagcaacagctggcggtggaggcaaaggaattagacaagtaactgatccaagtcaaatggccgaagctttagcggctgctcaaagtgaagctaaaaatgattttggagatgatcgaatgtatctcgaaaaggtaatgcaaaatgtaaagcatattgaggtgcagatttttcgtgatatgtacggtcatacggtttatttccctgagcgtgactgctctttacaacgaaataagcaaaaagttttagaggaaagtccttgcgatttaattacggaaaatgaacgtaaagaattgggtgaggttgcggttaaagctgcccgagccgcaaattatgttaataccggtacaattgaatttttgatggatcaagatcatcatttttattttatggaaatgaatacgcgtattcaggtagagcatactgtaactgaaatggtaaccggtgttgatttagttaaagcacaaattcaggttgcgaatggaggaccactgccttttacgcaaaaagatttacgggctaaaggtcatgcaattgaatgtcgaattaatgcagaggatccagcaaataattttatgccatcaattggtaaagtttcgtacttatatttaccagttggcaatccggggatgcgcattgataccgccttatatcagggacaacaaatttctccttactatgattctatgttagctaaggtagttgctttgggcaatacacggaaagaagcgattgctaagatgaaacgcttacttgaagaaatagttctgcaaggtattactaccaatcaagaatttcatttaaatatactaaatgatccaacttttattaaaggtgactttaacaatacttaccttgaacaaggctttatgccgcaatggaggagtgaaataaatgaaactatttccgcataaaaatactcctactgatacacatattaaagcaaataaagcggctgatgatcgagtacctgatggactgctgcgcaagtgccccaaatgccatcatgaaatatttgcgaacgaattaaataaattctatgaatgtccatattgtttttacggctttagaatctctgccaaaaaaagattatcgtggttagttgatcaagtacaggaatgggataaggatattgagtcctcgaatcctttaaaattccccgattatcaaaagaagatcaaacatgctcaaaaaattagcggcttaaaagaatcagtttggacaggcttagctaagattaaccaaacgcaattcgccttggctattatggatccaacttttattatgggatcgcttggtcaaatgactggtgaaaaattaacgcgtttgtttgaaaaagcaacgcttcagcatttaccagtcgtactgtttgcggcttctggcggagcaagaatgcaagaagggattcttgctttaatgcaaatgggcaaggtatctaatgcagtagctaggcatagtcaagcaggtcttttttatttagtagttttaacagatcctactactggtggggtgacggccagttttgctagtcaaggagatattattatagctgaaccacatgctatagtgggttttgctggtaaaagagtaatcgaacagactattcatgaaaaagtagcggcagatttacaagatgcagagaacgttttgaatcatggttttattgaccatattgttagacgctcacaggaaaaaagaatcattgaatggttaatcaaggtaggtggctatcatgactaaaaatgcaattgatatagttaaagctgcaagagatgaaagtcatatctctggtcatgagatacgcaaacttctttttcccgatttttttgaattgcatggtgatcggtgtggtactgatgatcctgctatagtaggtgggctagctacttttaatcaagagccagtaacagtaattacaactagcagaggacatttacttaaagaaagaattcaaaaacactttgggcagcctgaaccaggtggttatcgtaaagttctgcgtttaatccaagatgcaggtaagtttaggcgacctgtttttttgtttgttgatacagctggcgcttatcctggtaaaagtgcggaagaaaacggccaaggacaggcaattgcacaaaatttgcttaaagttagtcaaatacctactcctattattacggtcatgtatggagaaggcggctctggtggtgctttagcgcttgcctgcggagatgaagtttggatgttggaaaatagtatttattctgttttatcgccagagggctttgcttctattttgtggaaagatgtaaaaagagcaagtgaagcggcggaagtcatgaaattgacgcccgatgatttactcaagatgaatgtgatcgaaggtatcatcgccgaaccggataatcatcaagaggtttgtcaaaatatagcagaaaagctgcaaagtgagataaacaaattaagtaaattatccgaggcagaattgcttgctaagcgatacgaaaggtttagaaagttttagaggtaaaaaatgagtggatttttagcaggaaagaaaatcttggtaatgggtgttgccaataatcggtctattgcatggggatgcgctcaagcaatggaaaaacagggagcaaaaatcatttatacttaccaaaatgagcgattaaagaaatttattagcaaattagttactgatgaagattgcctgattgaatgcgatgtggcaagtgatgagagtattggacaggcttttggtttgattcaatctcgttttggcaaaattgatggcattgttcacgcgattgcatttgctgagaaagaagaattaggtggctcaattttaaattccacaagagagggattcagccaagcagttgatatttcagcttattctttcttggctgctgcaaaagctggaatcaaaatcttaaataatcctgcaagccttgttactttaacctatatgggatcagaacgtgccttgcctaattacaatactatggggattgctaaggccgctttggaatcggaaatgcggtacttagcgcgagacctgggtgaaaaaggtgttcgggtaaatgctatttcagcaggagctatgcgcactctggctgtctcaggaatccagggtcatgcatcattattgaagatttctaagagtaagactgttgatggtgttaatgtgacacaagaagaggtaggtaatacctgtgcttttttgatgagcgatttggctagtgggattactggagatgtaatttttgtagacaaaggtgtacatttacgctaatgcaaatttacaaatatcgaaaggttacttcaacacaagatcttgcaaaaaaatatttagcaaataaagctcaagaaattgctgcatttatagcacaggaacagacggcaggttatggcaagaggggacgctccttttattcaccagctaaaacaggtatttatttaagtattgcgcttcctaattttaagtttaaattagagcatgcaggcttattaacaatagctattggggtagcggtagttcatatactacaagaacaatttccttcgtatgaatttcgtttaaaatgggttaatgacatttatttaaatgataaaaaagtagctggtattctaaccgaaaaaataggattaggtttggtaataggaataggggtgaatatttttacggcatctttcccaaaaaatatctcaaatcatgtcggcagtattgtacaagctgattatgcttttgagaatatgaatgagcagttaattcgagctgttgtgcaggctgctaatacatatcaaaataataaatttttagacgagtatcgcaaaatttcttatctgaaaagtaaagttataactttgaaaataaatcattattatgtaacaggtcgagtagtgacaattgatgatcaaggacggttagttattagttgtcgaaattctacacgttgctattcaagtggtgaagttattaaggtggaattagaacccggatttaaggggaaacagtaaaatagtacaaaaaaagacttgagaagtaatttttctcaagtcttttagtttgtcttaatttaggttaattaaaacttgttcttgtccaaagcaactggagaatctggcttttcaccattgatcatcttcaagttgttgtcaaatgccttaacaaccatgttacgtacagcgtgggtggtgtagaaggcggtgtgtggagttaccaaaacgtttggacgatcaattaagtcagctaaacgcttgtctgggaattctttaccttcccaatcttcgttaaatacaccaacttcgtcttcgtaagtatccataacaaagccaaagatcttacctgagtccaaaccgcggataacagcgtcagtgtcaacaagtggaccacgtgagcagtttacaattacaacgccatctttcatcttggcaattgattcgtaattgatcatgtgtacatttgctggaacatctggtacgtgaagtgaaattacatcagcttgcttgtacaagtcgtcaagtgagtcaacgtagtaacccttcttttcgagttctgggttcttgaagatatcgtaagcaatgacctttgcgccgaaaccttccataattctcataaatacttgaccaatgtgaccagtacctacaacaccaacaacttggtcacgaacttcacgaccaatagtaggtgcccaacgtaagtcgcgcttagccatcttttcgtccatacgcttgtcttgacgtaatacacgagcagcttggattgcagcatgttcagcaatagcgtcaggagagtatacaggaacgttagtaatttcaaagccaagttccttagccttgtccatgtcgatgttgtcgacaccaacgttacgtaatgacatcttagttacgccagcgtctgccaatgcttgaagagtttctggggtgtagtctaattgttggtaaacaacaacaccgtcagcacccttagctaacttagcagtttcaggagtcaaaagcttatcagtgtaatctacatcgatatccttgtgagcatccttccattcgtttaagaatggttcttcgtctttacgaatagcgtaagcaaaaatctttgtcataaatttaacctccgtaaaatttattagtatgaccagtcctcattatacgcttttacttgctcaacaaaacacaaaagaaccatttttttgtatagattttaagaaaaataaaagtcaagttttactctgagcaaaaaagttgcaattttttcaaaaaaagtttatagcctaaaaattgcaactattattaactgttacctaatctcaatcccatagatatgaaaattatttttgtatatagcaatattagttaaaggtagtatatggatttgtataagagacgcattttcgttatataacccaggttatataatggactttaagtagagaaacaaacatagcggaggaaaattgaatatgcattttaaaggagaaagccaacagcatttcagcctaagaaagctgacaattggtgttgcttctgtaataatcgggaccacctttatgttttttggtggtcatgctgttcatgcagatgatttaagtagagatgctgagcaaaccagctcagttgttcaaaaacagagtagtgagaaaatagatgtagatgcagtcaaagaagctgataatgtttcaaatcaaagacaagacttacccagacggtactaagagtaccgcaactgttcctgtaactgtcattgcaccaaatgtaccagacgttatctacgtaccaaagggtgacaagtttccagacccaagtactgtagttactaactctaacgatatcaaggacaagattcctgacacgacttacacttggaaaactactccagatactccaaatactaaagtagtaattaactataaggctaataatcctggtactccagataccccagttactccaccagtggatccaggcgataatccagcaaccccagttaccccgcctgtaaagccagagcagaagccaacaacaccaactcctcatgctactaagacaccagcaaaggataatggtggcaagaagacagtagctagtgagcaaaaatctactttgccacaaacggggaagaaggataacgttgctttgactgctatcggtgtagctattgcagctgctggaagcttattaggattagcagatagcaagaagcatagatcttaatttgtaatatctaatttctgtttactaagaagcaagttgactcagataggagctagcttgcttttttgtctaaaagtttaaggatttctaaagacaaaaagcaaatagtgacgcattgtcataaagctgatattatatactcataacaaaaatacaacgcatcaaatagagatgaattgtaagaaggtaacaaatcttctaattccttattaatacatcctattgggcctttattaattcatacattgggtattgctttttgctggttgtcccctatgcaaccgcgaaagttaagattgataataagtccatcccctttttgcgaaggtaaagagtcaagaccccctgcaacatctcttgcgttgaatcttttgttaatcttgataatttatcttcgcaacattagtgatgagtaggctaatgtaaaaaaatctcgttattctcattcaacacaactcccttaaaagggctggtttagaaaagtcatctaaatcagtcctttttctttttttcgttataattaaacttgagaactaaaacaaaggggaagaaaaatgatcttaatttcatggaatatcgattcattaaatgcagctctgactggtacttcagctagggcggaagaaacgcggcaagttttaactaaaattcatgatgccaatccagatattattgcgattcaagaaactaagctgcgtgcaactgggccaactaaaaaacataaagaagtgttggctgaaaagttccctgagtatgactatgtttggcgctcttcagaagaaccagctagaaaaggctatgctggtacaatgtatctttataagaaaggattaactcctgcagtgtctgagccgattattggcgcccctgagccgatggatcatgagggacggataatcacactggaatttgataaatgctttgtcacccaggtttatacgccaaattcaggcagtggtttaaagcgactagctgaacgtcaagtttgggaccaaaagtatattgaatatctgcaaaaattagatgaaaaaaagccagttttagctagtggtgattacaactgtgctcataccgagattgacttgaagcatcccgaaaataatcatcactcagcaggttttactgatgaagaaagagtcgactttaccaatttgctcaatgctggctttaccgatacctttagaaaagttcatggtgagattactggcgtatattcttggtgggctcaacgtgtcagaaccgctaaggctaacaactctggctggagaattgattactggctagtaagcaatcgcattgctgataaggtggtccgctcagagatgatcgatacaggcaaacgagcagaccactgcccaattttgcttgaaataaatctttaaattgaagcaagccctagtataatttctttttgaaatgtttttattttgaaaaagaagtaggggttgaaattctttgaataacgagaaaaaagaagattgggctttggagcaggatctgaagtacaatcgtctgacagcatttaagctattcgcgatgactagttcaatggttatttccgttgatgaactcgcaccatttggtaaaactggagcaacggcactgttttacttgttaattgctggaatcgcttggtttatcccgattacgcaaatggctggagaaatggcctcaattgatggctgggaaaaaggcggaatcttcacttgggtgaaaggatctcttggagacaaaacaggctggacagcaatgttttatcaatggattcatattactgttggtatggatacgatgatgtatgtgatcattggggcattgtctatcacatttgggacaccttggttcaacaccacgccaatcgtacgcttcattttaatgatggttattctgtggggagcaacagcgattcaggtaattggtgttagaaagattggtcgaatcgctgaatggctgtttattctggggattgcgacaccagtaattttattgattatttcattcttcgtatatgtgattcaggggcatcccttgcatatgacgattaactggaatactgtaattccacataaattgaatggtaatacattagttgcctttgtcccatttatgttggccttttgtggtggggaagcttctgcaccgcacgttaaaaacttggaccacatcaagtcatactcaaaagttatgcttggcttagccgttactgcaatctgcttcgacttgctaggtagtatggcaattggaatgactgtgcctaaggatcaaatagagaacagtacaggctttgtttatacctatggcaagctgttaacgtcaatcgggctacctggtgatctgttgcaaaaaattgtgggtataatgttagcctgcggtattattggtgagctaggcaactggattgctggtcctaatcagggaatgtatgaagcggctaaagagggctatatgcctaagttttttgctaaaaccactaagcacggcgtgccattaagaattatggttttacaatcaagtatcgttaccatttctgcattattgattacttttaccagtggtgccgatgcagattttgcgtttaacgtttcattggccgcaacgacggcgcaatatctcatggtttatatgattatgttgattgcttacatggttttgaaaagaaagcatgaagattatcaccgtatgtattacatgagcaagaaccctaatttgagtattgcaattgcggtgcttgcattaatcatcacggttatagctttctttgtaacttttgttccagcacaaggcacgccaagcaatttgcgtcacgtttatgtttggaccttaatcggcatgtgtgccattgtgtcgattttgccacttattttgtatcgctggcatgaaaaatggcaatcacaatagaattaagaagcattcgtttttcaagacggatgcttttttagtagaatttgagagaggtgaataaaatggcggatgcgatgagggatgcaatattaaatggttttgttgatcaaaattatttaggaagtgaagaattaggtcctaaaatattagctaataatcagcaagagagaatctggcagaatttgcgccaggaattgtatagttgcaagtcctttacttgggcggttgcgtttattacgcaagacatgctagttccgtttaaggtgataatggcagatttagcgaaaaatggaattagtggcacgattattactggtgattacttgggttttaacaatccgcgtgtttttacggaattacaaaagattcctaatttagaagttcgtattgctaataaggcaggtttccatactaaaggatatttatttgatcatgaaaactatcaaactgtgattattggcagtgctaattttacacgttcagctctgctggctaactatgagtgggctttgaaagtaagttcaaaaaagcaagcagatttaacagctcaattagtggataaaattgcagatttgaaacaggatagttttgttttaaattcagcctggctaacagattatcgtaaaaattgggtaaagcctgagcgagttgctactgatcggcatcagacaaaaattttaccaaataaaatgcaaaaagcggctttaaaacagatagaagcactagttacaagtggtgaaaaacgagggctagtagtgtcagccacaggaacggggaaaacttatttaggtgcttttgctgttaagaaatatcagccgcggcgttttttatacattgtgcatcgtgagcaaattgctaaaaagtcattagaaagtttttatcgtgtaatcggtggaccaagatcggattatggcttattaacgggaaataggcacaatttacaggccaagtatttatttgcgacggtacaaacgataagtcaacctgagatgctggctaattttaatagcgatgaatttgattatatcttgattgatgaagcacacagggcagctgcaccttcatatcagcgccttttacattattttaagcccaatttttggttaggaatgacggctacgcctgaacgaatggatgagcaaaatgtttaccagatttttgactacaatttggcatatgaaattcgtttgcgggatgcactggaagagaagatgctggcgccatttcattatgtgggtgtccaggattatgaagcagacggagtagtgattgatgaaacaacagatttacgctacctagcttctacatctcgagtagactatgttttaaaggaattagactattacggctattgtggaacaaaggctaaaggcttggttttctgcagtcgacaggatgaagcacgtgaattagctcggctttttagtcaaaaaggacatcccgctgtagcattgaccaatgaggataatgaaaaaagacgtaatgaagtggttgcgtctttagttaaaggtgagattgagtatattgtagcggttgacttgtttaacgaaggaatcgacatccctgccttgaatcaaattgtgatgttacgcaacacacagtcgagcatagtgtttatccagcagttaggccgggggcttcgtaaatatcctggcaaagattttaccgttgtgctagattttatcggcaattataaaaacaattacatgattccgttggcactgaatcaggatacttctcgaagcaaagatcaagctaaacgagaaacgcgtctgccaagctttattgatgtttcaacgattaactttagtaaaattgccagtgaaaaaattttggcttcgcttgatagtgtcaagcttgatgggatgcgtgaattgcggcagagttaccatgatctcaagaacaaactagggcgtgtaccgctactatttgatttttatcaatatggctcagttgcaccgattgtttttgcacaaaatcatggcttggcaagctatgctgactttttgggtaaaatgggcgaagacgttaatttatcaaaatatgaaaatgaagtgctgtcttttgtgactaaggaattacttaatggtaaaagaattcacgagttacttttgttagagatgctacttgaacaagatattgttaagcaagaagattatctagctcaattgaaacgacaccatgcttatgtaaatgatgaattgttagcttctgttgatgcgattttatcgctagatttttttgatattaagcagggaaagactaccaaaaaagcacaatatggtaaattgccgttagttgaacgtagcaatttatttgactatcaattgaatggttctctacgctctgccctagatcaacatgattttaagaatttatttgttgatgctattaaaactggtttggccttaaatcaggaatatgataatcagcgtcaatttactttatatcagcaatatgatcgtaaggacgcttgtcgactcttgaactggcctaaggatgtttcggccccgatgtatggctatcgtgttggtgagcaggacacaccaatcttcatcacttatcataaagatgatcatgaaaagcggaatgctctgtatcgtaatacattggctgatgggcgcagtttgcgctggtatactcgggtaccacggcatttagattctgatgaggtacagcgtttgcttaatacgcgagggatgaatttgcatatatttgttaaaagaagcgatgcagatggtaagcagttcttttatttaggcaaggcaaagattcaagctgattctgttcgcgaagaattgctcggtgttaagaaaaagccagctgtagggatgaacttaatgttgaaacatccactgagtgagtcaatgcatgagttattatttgaatagaccaaaaaagcctttccgcttaggaaaagcttttttaattgccgctaatattaattagatcttggtcatcttggttattatccttatcaaacattctaggcttgatgtgatctagaatcttagtcccgatatttttctgagcagtttcatcaccgctaacctggtttaaaaacataattattccatatcgattatctgtagtcattttgatccaattaccaaaatgagtgttgcttaagctaccataagcagatttagtatggtcatcatctaaatgaagccctccagaataattagtggttgcacttttaagatgagttaagtaatagaaatcggatttgcttaagatactaccattggttaagccaagctggatcttgtaataatccattggggtagtgaacatattgcctgcgcctggaagctgggaggcaagagtctttttaacgtattcagcgtcttggtaatttttaccattattccagacgtaagagataggatcggttttccaactaggaatatcctgataaaggaatgtattagcaagccctaatttgttaatgatgcgattattgaaattgttttcgtaggattgtccgctgattttaataataattccggctaataaaagatagttggtattattgtagaagtaggttcctggtgtcccttgagtgccgttattagtattatcaatagcccaattgatggcgtcattctcacttaaaacttttccgcgatccaattcagtattggttgcttgaatgccagaagtatgggtcattaactgtccaatagtaatattatcggcgtttttaagattagggtaccaacgtgaaattttggtgttttgcgtaaatttttgactagtgtgccagttttcattcatcagctgaattatcattgctgctgtaacaactttttgcaaagaagcagttggataaactacgttgtcgttcccattaccaacttttttaccgtaccaagcgtagccatagctgatttgttgcggctgaccgtttttgataatgacgatactaccgcgagtattgttttgagccaaagtattgcggacaaaatttcgcatttcggttttaaagtatgaactggcttgaacttgtggtggttcagtgatcgcaaatgcaggaactgtcgttagcagcgcagcggtagctagtccaataattgattttttcaaaaattaaaaggcctcccttaaaaagtggtttgtttacattttagcgcgttctttgcatcggacaaactattatcttggtgaaaagacgtatttttagctagcttgttgaaaaagtgcggctaattttgctctgagtgcgggatcatgagcgtataaataggtaccgcggattcctcgcttgaatagaacgttgagtgaattcatgaccatcttctcttcatattctattttttcttttgagttggttagatcattacgctttttgaacatctcaacatctgtaattttgtctaaattaactttaagttgattggtgcggggaatcaggctgattggtggaccgataatgatgccagcataatttaggtcaaaaccttggcaagtatagatagaaccaacttcattgattgttgtaggaatttctgcccaaggagttgatgtgtagttgtattgatcccatggcagcataaatttcccttctttaatgtaatgtttgccaccatcaagagtagatggatagccggaagttgaaagaattcttgccaggccgtctgtttgatttctcttgacgatttcttgccgcattttttctgcatcagtaaaaatacgaaagtcgtagttgtgccacatttctttttttaagggcattaatttattatgtgtaaaaaagttaaaccattctattagactatctggtgccatcattctaaattgatgatgtagttgatagtcttcgtggggataatgatgagtaattgcttcaagtcgcttacgtgtccagaagcttttcattcgtaaaacttggttttcatcaaataccaaaatgataacttttgaccgcttaataacctcctctaattggttatcgtgataaaagttgttgtagtgatcaggctgagataagagcaagtgtgcttcatcaatgacgacaacatcagcactggtttgttttttgtccatctgattaataaatgaagttggccgcatataatttttcttatatagttctttaatcggcccagcaatctgcttatagacttttagcagttcagggtgatttactaaaaagtagttttgagttttatacagttggctgcctgtttggtggtttaatttttgcaactgatcaaaaagggcagaaagcactacacttttaccagtacctgcttcaccataaatagtgaaaacagcaggatgatttttattgctgcaatgtgtaatcgaaaaatgtaaaattttttgtacgagaagtgattgctcttggttgagctgatggtaaggagagagtttaaaacttgcttgattattcaatatttattcacctcgttttcaattataatgaatagaaataataatgataaaggaagaaaacatgactgcacaaaaaataattcacaatcggctatttttaagacaaaaatctgatttagctggcaaaaatgatttacaagttgcgataaacttgcgtgatacgctactagctaatcgtgggaaagctgcggggctggctgcaaatatgattggtcagactaaacaaattattgcgttttatgctggcccgcttccatttgtaatgctgaatccgcgtattattcaaaaaaagcagatgtatcttgctagtgagggatgtctgtcactagaaggcgagcgtaatgttcagcgctatgaagaaattactgttacttatcagaatatggagttagaaacagtaacgcaaacttttggtgactttatagctgaaacgattcagcatgaaattgatcattgcaatggaattctgatttgaatagtagaatatttacgtgattttgcaaaaaaagtaaaaaaatttaaattaattttgcatggtttcagggatgaaaacccacaattttcgaataattagatttgatagaataaaatactttttaatttaatgcaaagataaagaaaaatatattacaacactacctagtgtatcgtgaagaacccgaacgaagagcaagacttgccaaagcggagaaaataaggtaaattaataaagtcgcttcgagagatgcgacgagagcttaaaaacagacatgcaaggaaagaaaacaaataaaaagaaaaaagtacttgcaaagaagtaaataagctggtaatatatttaaatgtcgtcaggtgaaagcagaaaaagcttgagtaagacgaaaaaacaaatcaaaaaagttcttgacaaagaaatgatggtttgataaaatatgaaagctgtctgctttgcaaaaaagcaagacagaggtagtactttgaaaactgaacaaagtttcgctaaaagtgtgcgggtgtaaaaacccaaacaagaagcgaagtcaattcgcgagcaataaatttgagacaaagatcttaaataaggaatgagcaatcattcaaactttttaaaatgagagtttgatcctggctcaggacgaacgctggcggcgtgcctaatacatgcaagtcgagcgagcggaactaacagatttacttcggtaatgacgttaggaaagcgagcggcggatgggtgagtaacacgtggggaacctgccccatagtctgggataccacttggaaacaggtgctaataccggataagaaagcagatcgcatgatcagcttttaaaaggcggcgtaagctgtcgctatgggatggccccgcggtgcattagctagttggtaaggtaaaggcttaccaaggcgatgatgcatagccgagttgagagactgatcggccacattgggactgagacacggcccaaactcctacgggaggcagcagtagggaatcttccacaatggacgcaagtctgatggagcaacgccgcgtgagtgaagaaggttttcggatcgtaaagctctgttgttggtgaagaaggatagaggtagtaactggcctttatttgacggtaatcaaccagaaagtcacggctaactacgtgccagcagccgcggtaatacgtaggtggcaagcgttgtccggatttattgggcgtaaagcgagcgcaggcggaagaataagtctgatgtgaaagccctcggcttaaccgaggaactgcatcggaaactgtttttcttgagtgcagaagaggagagtggaactccatgtgtagcggtggaatgcgtagatatatggaagaacaccagtggcgaaggcggctctctggtctgcaactgacgctgaggctcgaaagcatgggtagcgaacaggattagataccctggtagtccatgccgtaaacgatgagtgctaagtgttgggaggtttccgcctctcagtgctgcagctaacgcattaagcactccgcctggggagtacgaccgcaaggttgaaactcaaaggaattgacgggggcccgcacaagcggtggagcatgtggtttaattcgaagcaacgcgaagaaccttaccaggtcttgacatctagtgccatttgtagagatacaaagttcccttcggggacgctaagacaggtggtgcatggctgtcgtcagctcgtgtcgtgagatgttgggttaagtcccgcaacgagcgcaacccttgttattagttgccagcattaagttgggcactctaatgagactgccggtgacaaaccggaggaaggtggggatgacgtcaagtcattatgccccttatgacctgggctacacacgtgctacaatgggcagtacaacgagaagcgagcctgcgaaggcaagcgaatctctgaaagctgttctcagttcggactgcagtctgcaactcgactgcacgaagctggaatcgctagtaatcgcggatcagcacgccgcggtgaatacgttcccgggccttgtacacaccgcccgtcacaccatgggagtctgcaatgcccaaagccggtggcctaaccttcgggaaggagccgtctaaggcagggcagatgactggggtgaagtcgtaacaaggtagccgtaggagaacctgcggctggatcacctcctttctaaggaagcgaaggatatggagagcaggaatgctaagagaagtatccagagcaagcggaagcacactgagaaactttgtttagttttgagggtagtacctcaaaaagagctagtacattgaaaactgaatataatccaagcaaaaaaccgagacaatcaaagagaacagattgtagagcgaccgagaagagaattcttgagtaaggtcaagtagaaaagggcgcacggtgaatgcctaggcactaacagccgaagaaggacgtgacgaactacgaaaagcttcggggagcggtaagtacgcagtgatccggagatatccgaatgggggaacccaatgcagagatgcattattgattagtgaatagatagctaatcaaaggaagacgcagtgaactgaaacatctaagtagctgcaggaagagaaagaaagatcgatttccttagtagcggcgagcgaagaggaaagagcccaaaccaagtgatttatcatttggggttgtaggactgcgacgtggcagtgtaagagatagttgaattatctgggaaggtaagccagagagggtgagagccccgtaagcgaaatctcaagcacgcctagcagaatcctgagtaggccgggacacgaggaatcccggttgaaaccgcgaggaccatctcgcaaggctaaatactagttagtgaccgatagtgaaccagtaccgtgagggaaaggtgaaaagaaccccggaaggggagtgaaaaagaacctgaaaccgtgtgtctacaagtagtcaaagcacattaaagtgcaatggcgtgccttttgtagaatgaaccggcgagttacgttatctagcgaggttaagtcagaaaagacggagccggagcgaaagcgagtcttaatagggcgaaaagttaggtgacgtagacccgaaaccaagtgacctacccatgaccaggctgaaggtgtggtaaaacgcactggagggccgaacccacgtaagttaaaaattgcggggatgagttgtgggtagcggtgaaattccaaacgaacttggagatagctggttctctccgaaatagctttagggctagcctcgtggagaggataatggaggtagagctctgtttggactaggggcccgtcaggggttactgaatccagataaactacgaattccagatatccatacacgggagtcagactgcgagtgataagatccgtagtcgaaagggaaacagcccagatcaccagttaaggtccccaaatctatgctaagtggaaaaggatgtggagttgcgtagacaactaggacgttggctcagaagcagccatcattcaaagagtgcgtaatagctcactagtcgagtggcgctgcgccgaaaatttaccggggctaagcatagtaccgaaactgtggatgtgttttaaagagcacgtggtaggagagcgttctaagagcggagaagttgaatcgagaggatcaatggagcgcttagaagtgagaatgccggtatgagtagcgaaagataggtgagaatcctatccgccgaaagactaaggtttcctggggcaggctcgtccgcccagggtaagtcgggacctaaggcaaggccgagaggcgtagtcgatggataacaggtagagattcctgtactgtgtcaaatcgttaagagcgaaggagggacgcaggaggtgaagcacgcatcgcgatggaacgatgttcaagcaacaagtgcggttaagagtcaaatgcttctaaccagcaacacgagttgtgaagaggagtgaattaaaagtagcgaaggtgtggtaatcacactgccaagaaaagcttctagccagagatgacatacccgtaccgcaaaccgacacaggtagtcgagtggagaacactaaggtgagcgagagaactctcgttaaggaactcggcaaaatgaccccgtaacttcggaagaaggggtgctagccaagagattggttagccgcagtgaataggcccaaacaactgtttatcaaaaacacaggtctctgcaaaatcgtaagatgacgtatagaggctgacacctgcccggtgctggaaggttaagaggagagcttagcgtaagcgaaggtttgaattgaagccccagtaaacggcggccgtaactataacggtcctaaggtagcgaaattccttgtcgggtaagttccgacctgcacgaaaggtgtaatgatttgggcactgtctcaacgagagactcggtgaaattataatacccgtgaagatgcgggttacccgcgacaggacggaaagaccccatggagcttcactgtagcttgatattgagtatcttttaaacatgtacaggataggtaggagccagagaagataggacgctagtcttattggaggcaatgttgggatactacccttgtttgaaggatgctctaacctcgacctgtaagccaggccagggacagtgtcaggtgggcagtttgactggggcggtcgcctcctaaagtgtaacggaggcgctcaaaggttccctcagaatggttggaaatcattcgcagagtgtaaaggtataagggagcttgactgcgagagagacaactcgagcaggtaggaaactaggacttagtgatctggtggtaccgtatggaagggccatcactcaacggataaaagctaccctggggataacaggcttatctcccccaagagttcacatcgacggggaggtttggcacctcgatgtcggctcgtcgcatcctggggctgaagtcggtcccaagggttgggctgttcgcccattaaagcggcacgcgagctgggttcagaacgtcgtgagacagttcggtccctatccgtcgtgggcgtaggaaatttgagaggagctgtccttagtacgagaggaccgggatggacgcaccgctggtgtaccagttgttccgccaggagcatcgctgggtagctatgtgcggaagggataagcgctgaaagcatctaagtgcgaagcccccctcaagatgagatttcctttgcgtaagcagtaagacacctcagagacgatgaggtagataggctgggagtggaagtcctgtgaaggatggagcggaccagtactaatcagtcgaggacttgaccaaagcgaagcaaactggaaggttttttgcgagaaggattatgtttagttttgagtgtaaaagctcaaaagagtacggtggcgaaagcaagaaggatacacctgttcccatgccgaacacagaagttaagcttcttaacgccgaaagtagttggtgggcaactgcctgcgaggaaaggaagctgccgtgctcttttttaatattccggcttagctcagttggtagagcgcttgactgttaatcaagatgtcgtcagttcgagtctgacagccggagtaaaggggagaaggaagcggaagacttcttttttgtgccttttgggtatgttaaaaggctaattaggctaagcaagcatgacttgagggtcaaatttaatataatcattaatagaagacatagtaaaattcctaacaagcttaattgaattgattacggaggctatgctctctttttaagtgcataaaaatcttatagagagatacgcgtggtgctagttaaatcgttctagacaataagccaaattataagctaaaattgcaatttccaaccggctttgaaagcctatcagactacgtgctcgattgttctcggcattgtaataggtcagaagcgaaaagtcgctttcaattgttctgcgaatagccatcaattgatgatcattgtgctttttagctcctgtcatatttttacgatatggtgtccaaagttcataacccatttgttttagctgttgatgcagttctttgcctaaatagccttcgtcgccaagaagatagtaattagatggatgggtattttccatcagttcaactgtctccctggcatcatgaactgatgcttttgttacgacataatcaagaatgtaaccgtcatcgctaacaatgacatgaactttgaaaccatagaagtaaattttcttggtggccttataaccaatgttggcataaccgcgaaaaattttagcacgatagttgcgaattggttggcaaacaggtaccggaaagctgtcaatgatcaagaaatgtccattcaggtcaacctttttattcatttcttgccgtatctgataaatcaattgcaatagctgacgtgaacgccgattaaaacgtgagtgtgataaacaattgaaacattcacagaatcttctttgtgattcaattcctgtcttagcttgccagataagtaaagccaaaatcagactgtccgtagttttaatttgatcaatatttcgccgatgagtaaactcagccggtgcatacaaacgataccagtgccgacaaattatcactaaatctttaaaactaacttgtaaatggtggctaaaacgcttaagcttaaggcagttcaatcagatcagactcttttctattattactatttacaagtcgagtctaacaagattggacttttttattaactaaaacgatttaactagcaccacgcgtagatagattattataaatacgcgtggtgctagttaaatcgttctaggcaatatgccatattataagctaaaatggctatttctagccgctgctgaaaaccagctaagcaaagaaaagtcgctctcaattgttcttctaattgccatcagttgatgatcgttatgctttttagcgcctttcatgtttcttcgatatggtgtccaaaggacatagcccataccttttaactcggcagttaagtcttttcctaagtagccttcatcgcctaaaagataatggttaattggatgagcattaatcatcaattctgtcgtttctttggcatcatgcactgatgctttagttcaagtacatagccatcatcgcttactagcgcgtgaaccttgaagccgtaataatagatttttttagtggctttctagccgatatcagctatgccacgaaagatcttgacgcgatagttgcggataggctgacaaactgggaaactgtcaataattaagaattctccagctgtttttacttcttgattccaatcttgacggatacagcgcattaaaggcaaaagcattcgtgcccgacgattaaagcgagaatgagacaaaccgacaaagaatttacaaaatcttctttgagattcgataccaatttcagtttgccaaataagcatcgctaagatggagctgtcagaaattttaacctgatcaacatttttacggtgcttcaattcatcaggagcacaaagcttgtacaaagaacgacaaattacatttaaccgagcaaagctaacttgtaaatggtgagaaaaacgattaagcttgagatagttcaattagatcggactcttttctatttaatttaagttacaacttgagtctaatccgattggacttttttattaactagcaccacgcgtttataaatattcaacgacagtaaaattaggtaagcaatctatatctaggaatctgttggggttctgattgtagtaggctaattatacaaaaatgagttaacaaaattctgatcagaattagtacggttaagattgaaaaaatagctggtaattattactgtatctctttgtaattaggtagcaatgctattttttacttctaaaatataattaaaccggtcagacaattcgtattgatctgaatttggataaacagttataacaaaactatgtgtgcaaagcagatgacagggacttttaattgatctcgtatgttggagcgcgctgtgttgactatttgttctaagtgaacagatgataagtatgcctctatctaagtaccaagatctaggaaattcattctgaagtagttaatatgtgtcaatatgtcgcacaaaggtaactatgaattacagcaacataagagaaatttgaaaaatagtttttaaattgtggcttgttattagtgaaaatgataaattaaatattattttggcagaaaatacagcttaataacaaaaaataaaaatattttttgcttacctttaaaaatatagttcgagatttataaagtttttaacgagttaaagtgatatttctataattgaaagcagattctactaatgtaattactataatcagaataaatatttcataaaaatacatagaacccgaacgaagagcaagacttgccaaagcggagaaaataaggtaaattaataaagtcgcttcgagagatgcgacgagagcttaaaaacagacatgcaaggaaagaaaacaaataaaaagaaaaaagtacttgcaaagaagtaaataagctggtaatatatttaaatgtcgtcaggtgaaagcagaaaaagcttgagtaagacgaaaaaacaaatcaaaaaagttcttgacaaagaaatgatggtttgataaaatatgaaagctgtctgctttgcaaaaaagcaagacagaggtagtactttgaaaactgaacaaagtttcgctaaaagtgtgcgggtgtaaaaacccaaacaagaagcgaagtcaattcgcgagcaataaatttgagacaaagatcttaaataaggaatgagcaatcattcaaactttttaaaatgagagtttgatcctggctcaggacgaacgctggcggcgtgcctaatacatgcaagtcgagcgagcggaactaacagatttacttcggtaatgacgttaggaaagcgagcggcggatgggtgagtaacacgtggggaacctgccccatagtctgggataccacttggaaacaggtgctaataccggataagaaagcagatcgcatgatcagcttttaaaaggcggcgtaagctgtcgctatgggatggccccgcggtgcattagctagttggtaaggtaaaggcttaccaaggcgatgatgcatagccgagttgagagactgatcggccacattgggactgagacacggcccaaactcctacgggaggcagcagtagggaatcttccacaatggacgcaagtctgatggagcaacgccgcgtgagtgaagaaggttttcggatcgtaaagctctgttgttggtgaagaaggatagaggtagtaactggcctttatttgacggtaatcaaccagaaagtcacggctaactacgtgccagcagccgcggtaatacgtaggtggcaagcgttgtccggatttattgggcgtaaagcgagcgcaggcggaagaataagtctgatgtgaaagccctcggcttaaccgaggaactgcatcggaaactgtttttcttgagtgcagaagaggagagtggaactccatgtgtagcggtggaatgcgtagatatatggaagaacaccagtggcgaaggcggctctctggtctgcaactgacgctgaggctcgaaagcatgggtagcgaacaggattagataccctggtagtccatgccgtaaacgatgagtgctaagtgttgggaggtttccgcctctcagtgctgcagctaacgcattaagcactccgcctggggagtacgaccgcaaggttgaaactcaaaggaattgacgggggcccgcacaagcggtggagcatgtggtttaattcgaagcaacgcgaagaaccttaccaggtcttgacatctagtgccatttgtagagatacaaagttcccttcggggacgctaagacaggtggtgcatggctgtcgtcagctcgtgtcgtgagatgttgggttaagtcccgcaacgagcgcaacccttgttattagttgccagcattaagttgggcactctaatgagactgccggtgacaaaccggaggaaggtggggatgacgtcaagtcattatgccccttatgacctgggctacacacgtgctacaatgggcagtacaacgagaagcgagcctgcgaaggcaagcgaatctctgaaagctgttctcagttcggactgcagtctgcaactcgactgcacgaagctggaatcgctagtaatcgcggatcagcacgccgcggtgaatacgttcccgggccttgtacacaccgcccgtcacaccatgggagtctgcaatgcccaaagccggtggcctaaccttcgggaaggagccgtctaaggcagggcagatgactggggtgaagtcgtaacaaggtagccgtaggagaacctgcggctggatcacctcctttctaaggaagcgaaggatatggagagcaggaatgctaagagaagtatccagagcaagcggaagcacactgagaaactttgtttagttttgagggtagtacctcaaagatttgaaaaacgccaagcgttagtcgggcctatagctcagctggtttagagcgcacgcctgataagcgtgaggtcgatggttcaagtccatttaggcccattgacataacgaagaaaaagagttaaagttatgtctggccgaaaataaaatactctgggggcttagctcagttgggagagcacctgctttgcacgcaggaggtcatcggttcgaacccgttagcctccattgatccagaaaaaggatcaaagagctagtacattgaaaactgaatataatccaagcaaaaaaccgagacaatcaaagagaacagattgtagagcgaccgagaagagaattcttgagtaaggtcaagtagaaaagggcgcacggtgaatgcctaggcactaacagccgaagaaggacgtgacgaactacgaaaagcttcggggagcggtaagtacgcagtgatccggagatatccgaatgggggaacccaatgcagagatgcattattgattagtgaatagatagctaatcaaaggaagacgcagtgaactgaaacatctaagtagctgcaggaagagaaagaaagatcgatttccttagtagcggcgagcgaagaggaaagagcccaaaccaagtgatttatcatttggggttgtaggactgcgacgtggcagtgtaagagatagttgaattatctgggaaggtaagccagagagggtgagagccccgtaagcgaaatctcaagcacgcctagcagaatcctgagtaggccgggacacgaggaatcccggttgaaaccgcgaggaccatctcgcaaggctaaatactagttagtgaccgatagtgaaccagtaccgtgagggaaaggtgaaaagaaccccggaaggggagtgaaaaagaacctgaaaccgtgtgtctacaagtagtcaaagcacattaaagtgcaatggcgtgccttttgtagaatgaaccggcgagttacgttatctagcgaggttaagtcagaaaagacggagccggagcgaaagcgagtcttaatagggcgaaaagttaggtgacgtagacccgaaaccaagtgacctacccatgaccaggctgaaggtgtggtaaaacgcactggagggccgaacccacgtaagttaaaaattgcggggatgagttgtgggtagcggtgaaattccaaacgaacttggagatagctggttctctccgaaatagctttagggctagcctcgtggagaggataatggaggtagagctctgtttggactaggggcccgtcaggggttactgaatccagataaactacgaattccagatatccatacacgggagtcagactgcgagtgataagatccgtagtcgaaagggaaacagcccagatcaccagttaaggtccccaaatctatgctaagtggaaaaggatgtggagttgcgtagacaactaggacgttggctcagaagcagccatcattcaaagagtgcgtaatagctcactagtcgagtggcgctgcgccgaaaatttaccggggctaagcatagtaccgaaactgtggatgtgttttaaagagcacgtggtaggagagcgttctaagagcggagaagttgaatcgagaggatcaatggagcgcttagaagtgagaatgccggtatgagtagcgaaagataggtgagaatcctatccgccgaaagactaaggtttcctggggcaggctcgtccgcccagggtaagtcgggacctaaggcaaggccgagaggcgtagtcgatggataacaggtagagattcctgtactgtgtcaaatcgttaagagcgaaggagggacgcaggaggtgaagcacgcatcgcgatggaacgatgttcaagcaacaagtgcggttaagagtcaaatgcttctaaccagcaacacgagttgtgaagaggagtgaattaaaagtagcgaaggtgtggtaatcacactgccaagaaaagcttctagccagagatgacatacccgtaccgcaaaccgacacaggtagtcgagtggagaacactaaggtgagcgagagaactctcgttaaggaactcggcaaaatgaccccgtaacttcggaagaaggggtgctagccaagagattggttagccgcagtgaataggcccaaacaactgtttatcaaaaacacaggtctctgcaaaatcgtaagatgacgtatagaggctgacacctgcccggtgctggaaggttaagaggagagcttagcgtaagcgaaggtttgaattgaagccccagtaaacggcggccgtaactataacggtcctaaggtagcgaaattccttgtcgggtaagttccgacctgcacgaaaggtgtaatgatttgggcactgtctcaacgagagactcggtgaaattataatacccgtgaagatgcgggttacccgcgacaggacggaaagaccccatggagcttcactgtagcttgatattgagtatcttttaaacatgtacaggataggtaggagccagagaagataggacgctagtcttattggaggcaatgttgggatactacccttgtttgaaggatgctctaacctcgacctgtaagccaggccagggacagtgtcaggtgggcagtttgactggggcggtcgcctcctaaagtgtaacggaggcgctcaaaggttccctcagaatggttggaaatcattcgcagagtgtaaaggtataagggagcttgactgcgagagagacaactcgagcaggtaggaaactaggacttagtgatctggtggtaccgtatggaagggccatcactcaacggataaaagctaccctggggataacaggcttatctcccccaagagttcacatcgacggggaggtttggcacctcgatgtcggctcgtcgcatcctggggctgaagtcggtcccaagggttgggctgttcgcccattaaagcggcacgcgagctgggttcagaacgtcgtgagacagttcggtccctatccgtcgtgggcgtaggaaatttgagaggagctgtccttagtacgagaggaccgggatggacgcaccgctggtgtaccagttgttccgccaggagcatcgctgggtagctatgtgcggaagggataagcgctgaaagcatctaagtgcgaagcccccctcaagatgagatttcctttgcgtaagcagtaagacacctcagagacgatgaggtagataggctgggagtggaagtcctgtgaaggatggagcggaccagtactaatcagtcgaggacttgaccaaagcgaagcaaactggaaggttttttgcgagaaggattatgtttagttttgagtgtaaaagctcaaaagagtacggtggcgaaagcaagaaggatacacctgttcccatgccgaacacagaagttaagcttcttaacgccgaaagtagttggtgggcaactgcctgcgaggaaaggaagctgccgtgctcttttttaatattccggcttagctcagttggtagagcgcttgactgttaatcaagatgtcgtcagttcgagtctgacagccggagctagcggaatatgaaagaggcgggggccagaggcttccgcctttttgtgtgctattaaagttctataattaagcttttctaagtcttgaaatttttttaaatagggtttccaaggaactttgaggagtttgtactctgaatggtattgatggatacgttattttttctgccggaaagccacagaatggacaagtgggctgctttaaaagggcttcgtagactttgtattgcactccattgaagaatttatagaaattgttgtaaaaaacgatatttttatctttaatatcgagatcaaatttaatacaatcattaacagaggacatagcacaactcctaaatagcttaattgagacagaatatcataaatattcatcaacaggaaaaattatagagctaataaagaagttatagctttttatttgcgttatgaaatgtataaacttgttgtctttgtctctctattagactggtaaatattcaaaagtatatgttaaatttcagacattaaatacttagaaaaaaggacatatttagatggataaaaattctgatagacttacgttagtgccatatttcccgaatgaaaagcagactcttaaatggtaccaggatcctaaaatctgtaagcaggtagataatattgataccgtttatgatttaactaaattacgtcgaatgtatgaatatttgtcagtgcatgggtggtgctactatattcaatatcaagggaaattgattggtgattgtactttgctaaaagacggtgagatatcaatcgtgatttgcaaagaatatcaaaacttgcatcttggtagaaaatgtgtcgacaaattggtgcagcttgcaagaattcagaaaatgacgcaagtgaaggctcacatatatgactttaatattcaaagcaaaaaaatgtttacaagaatggggtttaaagagcaacaacctgactggtactcttatgatttatagatcaaaaatattcatgttaccaagtaattcatacaaacaatcagttggtgtgatgtcagataagcactcgtattagaaaaatgtaatcatcagtaattaaagactgtagttgaatcaaataattaactcagcgtataaaatgctgagttagacaaaaaaacaacgagcaattctctcgttgttttatggattcattttgatcaaatttttagtttatctttagttgtaaataccaacttgattaatgtgggccaattccagaactggagattgagcgaggtccaaactaacatcacagccagcatggataccattattttcgccattaagccagtgggtattattagttacgtcatagacagtaccattaaatgcaatataagctggacgtccatttttaccattgtaatttgatagagtttctttagtaaattttctcatataagaagctcctttctaataagatcttgatatattaatggtaacactttgtcaccttatagcaagagatacgaaggagtcttatgcttttcttatgaaagatgaccacgccacccagcaatatcccaatctagaaagtcataattaagctttttaccataaattttctcgtaggcagcaactttttgtcggtagtcgagttccatcatcttatgagcgttttcgttggcgtttagagaaacgtcagggaagattggtggtaaaacatggacaatatatttggtctcataaaaattaggatctttcttttcgattttaggtagatccttaatctcgacaaaagtggagactaccggtacattttgtttagccgcaaaataataggcaccacgttgtaatttgcgaggcttgcgataattccaccacatctcctgttctggataaattaaaacccaattatttttagctaaagctgcactgaggtgcttaggaaattcatttccaatatagctaggactctgaactagtggaatagtgccaacataattcattaaatagcggaaaaatcccggtagcattaggttagtatcttcaattacaattgaaagctgatggtgcatcttgttagcgagcagcttcattggtaaagaatcaacctgattgtagtggttagaagttaaaattgcgccaccaataggtaaattatttaggttctctaaacctacaaattcagttgatccagctaatgctctggataaagtaccaaataagagatgtccaatacgattattaagcttacttgaaaaagtgttacgcttattccaataatcattgaccaatttaaggcgctgatctagggacatttggggatcgccgatttctacttttgctgtgaagttacgttcattagcagctttttttatatttttaatcactgcctcacgattatcgccaaaaatcatagtgttactgcctctcgtttcttaacttttgcccaattattaggatcttgctcagttttgtcttccttagcaagcatatgatccaatttttcgcggtctgctgcacgctcgtcatcagtataattattgagttcgttctttaattcatcgaaaaactgcgtttgtttggcactatcccagaagtactgtgcatattggacattagcaaaatgccatggcttaaagaaaagattatagtgaatcagaccaggattagttaaaggttcagtgttttcatttggcatagcatcccagcgaggatttaagtgcaaaattctgccttccccgatttcatttaaatagtcttgatcaggagcaatacaatcaaaatgatacttttctaaaagtgtcataaaatggtcaataaaatgttcagcgcgaaaggccctagcattcatgacgagcatgccagagttaatgtatttcttggggtcaagtgccaggacatttttgatgtattttatcatcttgtctacatattgaattgaggagtcggtgcaagcagcaaataaattatcacccaattcggagttgtatagtttagcaagatcgtcgtttacaattgtgtcgctatcaatatagatcaccttatcatattcgggaaaaagttctggaataaagaggcgataaaaaatcgacatggtaaaaaagtcagcgcgaagaaagttttccttacgattttgaataggttgtacaagttgatcatcaatatggaaaaacttcacatgaacgtttgaactgctaagatcagacaaagctttttgatgctttgatgagagatcttgatttaaaaagtaaacagtataatccttatttggatctgtatgtttgactaaagaattaagagaaacagcagcgtatttggtaaagtcatcgctgatactgtaaaaaataggaattgtcataaaattacctttcttagattttaactgattccgtttgtttaaccttagcccaggtatttggctctttgacaatcatgtcaacttttttggccatccattctaggttagctcgggccttttgacggtcttcatcagtaaagttgtctaattgctgctttagttcatcgtaatacggcgtagttttagcaacataccagaaataatgaccatattgaacatcagcaaaatgccatggtttgaagaaaagattgtagtgcacgatcttaggatcttgaatttcaggaatgctttcatttggcatagcatcccattctttaggtaggtgataaatcttatcttcgcaaatttcattcatgtaggcttgatcagggtcaacgttatcgaaatgatatttattcattaagtaatagaatttatcaacaaactttttgtctctaaaggccttcatattaaacagaattacaccattattgatgtatttttctgcaggaaaaattccctgacattctttaatgtacttttgtaaaagtggcatgtaacgaattgataagtcgggacatgaagcaaacatgttgtcggcgatatcaatttcatacattttagcaatatcagtacagataatagtatctgcatcaagataaactgccttgtcatattgagggaacaattctggaatgaatagtcggtaaaaaattgacatagtaaagaattgagcacgcaagtagttttccttagtattgtgaattggcttaaccatgtcatcgtcaatatgaaagatttgaacatgaatattatcagttgaaagatcttctaagctctttttgtgctcatcagatatctgttggactaaaagggtaatcgtatagtccttcttggggtcagtatggtcaattaatgatttaattgaaacatatgcatatggcgtataattatcgctaattgtgtaaaaaacaggaatggttttcaaaataagatcctcctaaattatttttttaaattatttcgtaatttgagatattcgttaagcaaatcatcatattcatgtaaatgaagtacactgtgtacgcgatcaacatcccatggcttaactgtttgagtatggaaataaggccaaaacctaaagctagtagtgaaatgttgaattttggtgtttttttgcaaatgatattgctcattataacggcgtggtgctactcgcttggctacagctagcttgtttattgctgattggtcgggcaaaaacatttgcttaacctgcatcatatgccgcacctcggcaaagagatcagtttgcttaattttcttcatattcagcaacaaaacgccagaattaagataatcaaatgcgcgcttggtcttaagattgtggaagaagaagcggccccaataatcaagtacgcccactaattcgattccggtaatatcctcattgtaaaaagttgtaatatcaccgcgaatgacaatgtcatcgtctaaataaagaatgcgatcaggaatctgtggcaattggtctgcaaataaacgcaacatagcatatggcgtgaagcgagtattcatgttagcggttggcggttcctgttcaaataacttggtgcagtcaattaattcaactgtactgttaggattggctttttttactaaagaacgtaaaaaatcagccgcatgttgtgagaaagggtgatatttacgttcatcactgtgtgcctccatcgttaaaatataaagatgcaattcttgagcaccagaatttttgattaaagataaggtggaaatcaaaacgccatcttgagcattttcatctccacaaaaaagaatattcatgataaactcctattttttatttcttttgaatatattgacaatattcataatcgctattttttgcacgctgcttcattacctgccaaatttcatcgtgaagcttattttgagcttccttacggcttaaatttgtatccgggtaaaagggcccatcaatgtaaataacggcactaggccgcttgctaagccactttttatggtaggttttggtcatgacgaaactaggcgcatttaatttaactggaaagtgcatgcttgttgcatcgaacgggcgaatcttcgtgtaatagggccagacatgagcttcagggtagatgagaatctcgccctttttatccttaatcacagtttgaatggctttaattagtttgagcgattgcttcatatttttgccaacaggcagaccgccgtagcgtacaagatatttgccaatgaaggggatgccccagttagcttgattagcaatagcataaaaatttttgattggaaaaattgtgagcgaggtaaagacatcccccatgggtctagtatggttgccataaataaaatagcccccattgacttgcttaagtttttcttgaccaacgacttttacatgatcgaagaagcggaaaaccacccaaccaaaagcgcatgctaagtgacaagcggtagtggaccagattctagctccaagagaattaggtagaataacgtaattatcgggtagactgaaattttgatcgtgactatcgactacatcatcggttgttttttggtaataataaatccgtttcatcttgccctccatgatacttatgtatcctatgataccatggaaaaaagcctaattcctaagacgagaggaatgctgaaagaaaataaaaaagattcgtaatttcatgatcgaaaaatacgaatcctctgtaaaatagcataaaaaaagcaccgccttcttgcagtgcatctttcatattatgggtggccaggggatcgaaccctggacccacggattaagagtccgttgctctgccagctgagctagccacccatatttgttcatcagctcccgccgacatttaaatatattaccagtagttttataatttgacaagctttttttgaaaaaagttgaaaaataatttgaagctagcaaaaagcgcccataatggccgcttttttactaaagtttatcttgaatatgataggctgtgccttgctgatcctgcttcatgtgatctgcatagtaaacagcatagacaccgctttgatcatttttggcaatcacaatttggcgccctgttggacgttctgccttaatgatttgagcactgcggcgtgcttctttaaagtcgtgtgaagatgcgatggcatcccctggattaaaaaatacagcttcgttcattgtaaagccccctcgtacaaattctaattttattttaccaataaagccctttctaaatccaatttaagaaacaaaaaagagataagatcaacatcttatctcttacgaaaaatattatgggtggccaggggatcgaaccctggacccacggattaagagtccgttgctctgccagctgagctagccacccatgtcgttgaatcaatcaacagatattattatgctattgttgataagaaaatgcaagctttttttgaaaaaaaacaaacccggatttaaaattgaagtgcaacactaagtgttaaacaaaaaggccatgaagacctaaacttgaagtgacgaaaaatcaagaaaggaagatcttcatgaccaattcaaattctagcatttctaagcactatcatcaattaaccagcgtacaacgtggacaaattcaagcaatgctggattccggcataacttcccgtactgttatcgctcaagaagttggctgccataagtcgacaatcagtcgcgaaatcaaacgcggaagcgtcctgcaaagagacagcagctatttattgtatgagcactattacgctgatactgcacagatttattatgagaagcgtcgcaaaaactgctatcagcgcaatccattgaagcattatgctgtctttttgagaatgctctccagacgctttaaagctaaatttgatgccaccagcatcgatgagttcgttggtgaattcaaaaggactatgccaggctacccttgtcccagcacaccaaccgtctatcgctatattgatcagggcttgctggacataagcaatattgatctgcctatgaagctcaaaagacgcaggaacaagcgtcatcacagccatggcggtcacgctttgcacaagaagcatcttggcaattccattgaacagcgtcctaaagagattgaagacagaaaagctccgctgcactgggaaggagatctggttaaaggcgtcagacgcaagaatcagcctgctttaatgactttgactgaaagaaccacacgctttgaagtagttatcaagattcctgactatcgggcaagcacatgccaaaggctgcttcaaaaggagattgacagacatcctgcctggtttaaatcaatcacgtttgacaatggctctgagtttgcggatatgaccaagatcaagggctgccagatttactttgctcacccatattctccatgggaaaggggcaccaatgagaactgcaatggtcttttgcgtcaattcttccctaagggcaagagcatgaaagacaagtcaaaagcttatgttcaacaggcaactgatgccattaaccacaaatatcgccgaatcctccaatatcacacagcagaggaactcttcaagcaatatatctcttcataacctaactgttgcacttaatttgacaattcagggaaaaaaaacaaaaatttttggctaatgttacaaaattcagtataatgtaagggcaaaggaggcattcccgatgccaaagaagattctcgtcgtcgacgatgaaaagccgatttctgatattatcaaatttaatttaactaaggaaggctttgatgtcgacaccgcctatgatggcgaagaagctgttaaaaaagttgacgaatacgacccggatctaatgattctggatttgatgttgcccaaaaaagatgggttggaagttgcgcgtgaagttcgtcaaacgcatgacatgccaattatcatggtaactgctaaagatactgaaattgataaagtcttaggactggaaatgggtgcagatgactacgtaaccaagccgttttctaaccgggaattagttgcccgtgtgaaggctaacctgcgtcgtcgtgatattgttaaaaaagcagaagctgccagccaagaagagaccgataagaatattaagatcggtaacttggtcattatgccagatgcctatattgtagaaaaaaatggtaagaagattgaacttactcaccgtgaatttgaacttctttactatttagctcaacatatgggacaagttatgactcgtgaacacctgcttcagactgtttggggttatgactacttcggtgatgtgcggactgtagacgtaacggtgcaccgtttaagagaaaagattgaagataatccaatccaacctcaaattttagttacccgtcgtggtgttggctattatgtaaaacagccgagtgaagaataataaagaaagccacagaactgttatggtagtggctttcttttttatattttttagatattgaatgagtagaatgaaaaaattcaaagcaagattaaatagtacatttaattccattaatactaaaattgcaattgtgttcatgctgatgctactggcaacaattgaagttattggagcttattttacccgtcaattagagcaaaatagcattgaaaatttccaatcatcaatccagattcagactatcgtcagcaatcagttagctaatcagttgaccagtgataataaaaatactaatgatcgcttgaatcaaattgttaatgactacaataatgatgcaattagtgaaattattgttgtcgataataaggatacgattcgtgccgtttctaacttaaatgataaaagtaagatcggtcaacggattaacaatactgatgtgaagcaggttatttcaactggacatcaaattaataaagtggtcgatgatcatggcaattacatgattcaaatatcgccgttgactagtggcaatggctctaacaatactgttggtgctgtctatgttaaagctagtatgcaagatgtctttaacaatttgcgccaaatttcattgactttcttgattgcgtcattgatcgcggctttattaggtgcatttttgtcattagttatttcccgggcaattacgcaaccgatcgaagaaatgcagaaacaagcattgcatattgctgatggtgattattcaagtcaggtaaaaatttattccaatgatgaactagggcaattagctaaagcatttaataccctgtccgtacgaattgaacgctcacaagaagagtctgatagtgaacggcggcgactagatagtgttctgtcacacatgagcgatggagttctagccactgatcgtcatggtaacgtcagtgtggttaatcatatggcactaaactttttaaataaaaaagaagacgaggttatcaataagccgattgctgaagtactgggactagaagatacttcgtcacaagatttgatttctagtcaaaaagagatcgttattacccttgatccaggtacgcgggatgaaattattttgcatgctagtttttctttgattaagcgggtaactggctttgtatcagggtcagtttgtgtattacacgatgtaactgagcaacaaaagaatgaagattcacaaagacagtttgtttctaatgtctcacacgaattgagaacacctttaacaagtttgcaggcttatattgaagctcttaatgagggtgcttggaagaatccagagattgctcctaagtttttggaagttacccaacaagaaactagtcggatgattagaatgatcaatgacttgttgagtttgtctagaatggaccgtggcgtttcaaaaatggatctagaatttgttaacttaaacgattttgttaaccatattcttaaccgtttcgatatgattgttaaaacagataaaaataaagaaaagaagaaatacacaattaagcgtgaattaggcagtcaagccttatgggtggaaatcgataccgataagatgatgcaggtaattgataacattatgaacaatgcaattaagtattcacctgatggcggtgtaattactgttagaatgacccaaaaccaaaatcatgttatcttaagtatttctgaccagggcttgggtattccaagaaaagatctgggtaaaatctttgaccgcttttaccgagttgataaggcacgttcccgggcccaaggtggtaccggcttgggcttggccattgctaaagaaattgtggaagctcaccatggtaaaatttgggctgacagtagcgaaggcaaggggtctactttctatatttccttgccatatgaaccgatgacagaggaggatgattgggatgaagtttaaattcaaattcggtgaatttttcttaggcttagctacactgatcgtcattgtcctctcaattgtgctttggatctttattatgactagtgatcagcgctttagtaatattggtcagcaaaatcaaaataatatcactaaagagcaaacgcgtagtcacaattttaagtcattatatgatttatatattccaactacttcatatggttttgctaatggaaatttgtgtcagctatatgattcaaaaaataatttgactttagaatttaccaaagagataaaaaaagccaaggccactaataaaattaagaaaatagttgatactagaactaaatatgaagagtatttaaacaatcccaactatgtgcagttggtttatccagatgaaattactttctccttatttaaccagttgaataatgccgcaaatgataaccgcgagtttaaccgcttctttatctcgcagtcaaatcactggatttatttgggaaatgatcagactaatgaaatttatcaagtaaaaattgctggcgcaaattttgataaactacgtaaatatgcatgtaatgctaagagcaagtatccagttagattagttcgtttaaaggaaggctattcaccgttttacatcaagacaatgaatgctaaagtttatagttacttgactaatcatcaatcgtattcttactttgtttcgcgtttattaggtacatctggcgttactagtaagactaataagaatggtcaaacggtatattctttgaactactatactcgcttaagagtgccagattctaattcaggtgagcataattatctttatactcattatgaaaaaaataagatccccaatactactaaccgcttattagatagcgtttattatgttcaccaattgggtttaaccgagcaagatttacgcttctttgatgcagatggtgctaatgttagttatctaaactatattgaagggattcctgttttcttaaataagcatgatttgcaagtcaagacgaccttttcaacagattcgattaatgtggcctttaatagtgtaaacttccaaattccaattccgtttgatggtcaaactaagcggttaaaaccaacccaagatgttgttgatgaattagtcaatcacggcctaaagcaggaagatattcaacgaattatcgttggttttgctgaagaaaaggattcaagtcaccatagtttgattaacttgatcccaacgtactatatcaaagcctacgatgaatggaagagcctaggtgaatgggaaaagcaagacgtatctacctaccgtgaagctgatcagttaactgttaacgaagggggaaaatagaaatggaccataaacgaatcgaatggctatttttcgttgttttctttttaattgatatttatcttggaatcgaaattctccgttctcccgttaatttaagtaacgctgataccactactcgtagtgttgctagcatccgcaatgaaatgaagtcagacaatattgatttgcccgataagatttcggatgcaccagattctggttattatttagctaccaagaatcgtgactatctctctggcaaagttagctcgctgactaatgtaaatgcccgctattctaaaagcgataatgtgctttatggtgaaccaagacaagcagtccttttgagtaaaaaacctaaggaagctttagaacaaattgaagattttaagaatgattcgaaaaatattccttatggtaaagaattcaagtatgaacctgatatgtcgagtgaagacaattatgtttttgtgcaaaactcagattatggtgaaatttatgctaactcggcccaattgaatatcaatgtaaaagataatcagattattaattttactgaaacatatatggggcaagctagtccagtgcgtgaattacagtcaaccatcagtgcttggcgtgctgtgcgtgcgatgtacactgatcgtgagttgactaataattcgcgcgtaacgcaggtaaaattaggttactccaaactgacagaagtacgtggcagcacaatcttgttgccaacttggctggtttgggtagaaaataagacaactaaaaatatcacgatgaaacgtattaatgcatatacggcacagatgctacaatcgagtacctataatgtagaaaagtagaagggacaaaaattgaaggtttccgttttagcaagcggctcgaccggcaataccagtttaatcgttacaggccagcataaaatcctgatggatgctggcatttctggtaagaaaactaaagatttgctagccgaagttggagttgatattaacgagattgatatggcctttttaagtcatgatcataccgatcatagtggcggactcggcgtgttgatgcgccgttatcctaagatagatgcttttgccaatagtgggacttggcagtatttattggatacgaaaaaaataggtaaattaccggctgaacaaatgaatacaattgaaccaggccaaactaaaacttttggtgatgttgatattactgcctttgcaactagtcatgacgcagctgagccgcaatattatgtgtttactagtggtggtaagcgggtcgcttttttaactgatacaggttatgtatcagaagaagttgaagggacaattgaagatgctgatgcctatatgatggaatttaattatgataatatgatgctcagagatggaccatattcctgggcactgaagcagcgaattttgtcggatgtaggccatttatctaatgacgaagcagcccaggcattagttgatgtagtcacacctaaaacaaagcatatctttttagcgcatcgcagccaacataataatacggagtatttagctcacgaaacggcaaaggaaatgctgcttgagggggatgcgaatttggatgatgatgttaagattattgatacagaacctaatcagcctacaaaattagttgaaatttagcagttttcacaacattttttcatataatattcaaatttaatcggtatgattagtaaacaagatgaggggagaagcaagcatggtagaaaatcaaaataataataacaatttacaacaacctagaaaaaagaatactaatggtaaaatcattgccactgcagcgattgtcggtgtagttggtggcttgatcggtggaggcgtttcatattacgcagctgatcaaatgaataatgcatcagttaataatggtgccgctcaaactagtgtatcttcaagtagtagtaaagtttcagaaaagagtgctaagactagtggcacaatgactactgcatataatgatgtaaaaggagcggttgtttcagttattaacttaaaacgccaatcaagttctaatagtactaattcactttataatagtttattcggtaatgatgacagtgatgatagctattcatcaagcagcaagggcaagcttgagacttacagtgaaggctcaggtgtagtctacatgaaatctaatggcaagggctatatcgttactaacaaccacgttatctcaggcagtgatgctgttcaggtaatgctagctaatggcaagacagtaaatgctaaagttgttggtaaggatagtacaactgacttagctgtgctttcaattgatgctaagtatgtgactaagacggccgaatttggcgattctaagagcttacaagctggtcaaactgtcattgccgttggttcaccattaggtagtgaatatgcttctacggtaacgcaagggattatttcagcaccggctagaaccatttctacttcatcaggcaatcaacaaacggttattcaaactgatgccgcaattaacccaggtaactcaggtggtgccttggttaactcagctggtcaagtgatcgggattaactcaatgaagttagcccaatcaagtgatggtacttctgtcgaaggaatgggctttgcaattccatcaaacgaagtagttacgattgtgaacgaattagttaagaagggtaagattacccgtccacaacttggcgtaagggtaatcgcacttcaaggtattccagaaggctacagaagccgcttgaagataaattctactttgaagagtggtatttacattgcctcagtaaacaagaatagttcagctgctaatgccggaatgaagagcggcgacgttattaccaaggttgacggcaagaagattgatgatgtggcatcgttacacagcattttatacagccataaagtcggtgataccgtaaatgttaccgtgaacagaaatggtaaggatgtcaacttaaaggtaaaacttgagggtaactaaaaatcaaaatagaagttaattaaaagaaaaaaggctatatcacgcggtttaaacgtagatatagcctttttgttaactttttaaatgtgtaacatcaaattgttcggaattatttgttgtcaaacagacactagcctgttgataagtgtggataactctgtggattgtgtataacttgataaatataggtttattaacttgtggaaaaatatgatgattttgaccttatttagtgaattctatttgagaaaacaggcgttcatgcaggcataacaagccttaagagataaagtttgtgaaaaaaggctttcataaaatcgatgtgaataaagaaattttagaaaaattattaaatacaacttctggggtataagtaaaataataccacaaaatgttgaaattggtctttgaagttttgtggaaaagtttgggtaaatagtgtggaagggatgttagtattgtgctggtagattaaaattatgaatggaaaattagctatgcttgttataatagaagcatgaatatcaaaattgtatgtgttggaaaattaaaagagaagtattttagggatgcaattgcggagtatgagaaacgactcagtcgttttgcaaaggtgtccattgtacaggtgcctgatgaaaaagcaccggaaaaattcagtgcagctgaagatgagaaggttaaagagattgaaggtcagcgaatcctgagcaaaattaaagataaggagtacgtgtatgtgactgcaattaaaggaaagcagcgcagcagcgaagagttcgctaaagagattcaggatctcgcaacttatggtcattcagacattacgtttgtcattggtggcagtttagggactagcgatgctgtaaacaagaggggaaatgacttgattagttttggtaaattgacgatgccacaccagttgatgcgcgtggtgttgattgaacaaatctatcgtgcatttatgattaactcaggtagtccttatcataagtagaatatagaaaaagcccataaattgggctttttatttttgcatatttgcagatttcacaagcatattgaaaaaaactgtggcaggtcagtgcttttttagttttttatgatttaaaaatagattttgttaaattatgtttggcaacaaaaaagacgatctttcgatcgccctgataatttttgagctaccagctagtagctcacgcacacgctgaagtgtactttatctttgtagtatctcaattttaacacataaatggtaaaattaaaactgcacgctgaagggggtaagtgtcaatgtttttgcggtagcctttaaaccattagtctaaccttaatttcttaaatatttatatgacttaaatttctgcttagcttgcttaaataactattgccagctacctgtgcggttaatgcgccatgctggatgcctaaatgaacttcatgacgcttctttaagctgtcacgggccgctgcttttaattcctgttcagtcaatacagttatttctgaatcttcaaactcgctgctaagccaaaattccagctctcgattcttgatgcagcttaagatcctaagcatgccttctgctccagattttgaccatttcttgccttgccccttaacacggtaggtatacttgcggtggttgctctcgcagcagccaatggctttagtcacagtcagttttcgtttcttaaacggcttaatatcgtcccaatgacgatcaatataattccttaggcgccccagataatcatgattgagctcggtattcaattcatcaattagtcggctttctgcagtggttaggatagttttaactttgtcatagctgtatttgtattccaaagcagaaatcagcttgccttgcaggtcaggcgcaaaatatagcctttctttgattttcttatttaggtgaaagacatccaagaaatgctcatgacgcttgcatagccctacaatgtcatcgaagtctgttttggcatatccagcaccgccatcggcgttgctaagaattacagtatcagaaagatcataagtattggccaggtactccttggcttcgttcagcgcatcaagtcggcttaaagaaacaaattccttggcattgattcgctttctgcgtttcttgcttatattgacaatgccttcacagacctgatagcgatgaaattccaaccggcttttagtgcctttgatcaccacgccatcgccttcaagatacaaaactgggacctttttcttagtgcctgcggcatcatatcttgaatctgcttcttggccagctttaatatttttcccggccatttttaccaaattgcccacctgcatatggctaatattaaagccagacaggcaattgactgctagagcagtattgcgataagtggcaacgctgcttacttctaagatgtttttgactgctaaaatactgtagcgcttgtatttgtcaaagcccattaattcatccaagggataccttgcttgtttgcctgggcagacatatcttcttctgacatacctaacttcgccaaaagccatattgattgagcgctcattcttcttatcaatctgatagccctgtgctttaaccttggtaatcatttcatcatcaactttagctaaagccaaggccatgatttccttaatcaggtttaagaagaaacagattatttttctttcacgcttaatataattatcttcagactttataatatttgcgatttcagttacaattgaattcataaaagaccagcttctaatgtgttttttgttcttaacatcagactactggtctttttgtttgagctcaagtccaaattcaaaggacttgggcttttttaattatttattcaacttaccgtaaaaaattatacacttagctgaaggggtagcgcccttactcgtgtggaaggaggtagactcaatacagccgtccttcggggcggctttttttatgatgaaaatggcaagtcattgggtgaaaagtattacgcatatcgtgcagtaactgtaaatcaaagtcccataacaattaatggcgctaaattctacaagttggctgatagggatgcttatattaaggtgaccaatattagtggtcaaggtcgcgttttaaagcgtaacgcctacatctacagtacatcaaaaaaaacgcactacgcataacggtgcttggaagttgtacaaaggctccacagtgacaacttacggtggttcatacaagtttaagaatggcaaacgctattacagaattggcggacctgctaagcaatatgtaagaacatcaaactttaattagaagttgaatatcatttacgacagcaacataatagttgctgtttttttgcctcaaaaaccatagaaaatcttctgtaatcaaggtaaaatgaaattgattttacaaatatcatggaggatgttggaatgagaaaacgatggacagcagctgttattgctgctttagttgccgtaagtactgccgcaactactgttaaggctgacgatactaacacaacagctaatactaatgagacgcaagtaactgcaactagtgaccaaactaattctgattcagataaggttacttataacaaggcagattatttgtctgctaaccctaaattagtgcgaattaagcatgcaactactgcttataaggatgctgcattgactaaatcagcacagagcgtaaaagcaggatcacactttttaattagtcgaattgttaaatctgacaaccaagtaccaatactaaagactagtgatggcttgtatttgcctgctaaaaaatctttggtaactaaggtcatagcctaccaaaatcctaagggttatcatcaagtacattacacacaagttaaaccatacggtaaggtgggttataacttgtaccgtggctatgagggtattaagacttggaaagtaatgcatagagttggtacttgggcaggtacgaattactataaccaagctacttataacgcagtaaagaacttccaacgtagtcaccacttgccagcaactggtaatgttaacttagctacttgggaaaagatgggcttttctaagaagtcatggtatagcattgatagttatgttgccccacttaaggcttatgcttggcaagggcgtaaagctcatattgaagcaatgattaatcaagcttacaaatatatgggaaaaccatggttagcaggttgttcaactagtccaagctacggtgttgattgttctggtttggtaatgcaaggtctttatgcaggtggcattagtccagttccaactagttcaatcggccacgctcatccaggcaatgaatggaattcacgtaatctttgggctgacaagcacctaaagcgtgttccatattcacaaagacaatgtggagacttagtgttctattaccaaccaggtacgcacactatttggcatgttgcgatttacttaggcaataaccgggtaattgaaagctggccaccacgtgtgatggttcaaccaattgttaattcacaaagaaatgtaattgctggtattaagcgaccatttatttaaggaaaaatatgaaaaaatacttagctattttattagtcagcctgggctttagttcattattgttaactcgccaaacagtacatgccgctgataatgatgatgccgcgacaactaatcaatcggctcctaagtatactggccttaaaaaagttggtaaacattatgtctattttgatcaagcaggcaagcaacgttttaaaaataccaagactaaaaaagcatattattggattaataaaagcggcaagatagttggtattaataactacgccaaggtaattagccaactacctgaaatgccaactggttgtgaaattactgccgtgacaatgatgattaattttgctggtaaaaaggtaactaaacagcaggcggccaagattatgccgcgcagctctaaccctaacaagggctttatcggttcgccttacaagaaatatccgctcggctattgggttgctcctaatggggtgaaaccagtagtgaagcattatcttggtagagcacagaatatgattaattgtggtttgcccgcaattaaggataagctgattaattcacacttggtggttgtttgggtagggatgtttgacggcctctctaaccatgctattaccttgacgggttaccatggtaaaacgatctattataatgatccttggactggaaccaagcggaaaatcaagcaggaaatttttgcaacgcattgggctttagatgctcatcgggcgttgagttattaattttatgtaaatatatttactttttagtcatgttgatcaagccactttcgcagcatttcaacatattcatctgttttttctacaaaagacatgtgaccgcagttttcaaatagctgccatttactgccagcaagctgatcctgcatcgttttagctacataaggtgtacataaatcatcagtcccactcgtaattagagttgggatttttattttgcctagtttttctgtgtattcgtaatcgtgcaagttgccctctggcgtatattcatttggtccccaggcggtttcataagctacaataccaccacatttttttcgcataacgcattcaggccacgttttcgtcatgtcaattgcatgttgattcatgaagtgctcattagcttttaagtaatcaggatcgttaaaattgctagtcaattcggcgcgatgaattgccgcctgttcttcaattggcaagtatttaatcatccggtgtaattctttgctccataaggaagcagacgacaaggttgaagacaagatcaagctttgaatgccaacaggatgataatcacacatgtagattagcgctagcatcccaccccaactttgtcctaataaatgtattttgcgcaaagccaagtgctcccgcaacgccatgagttccttaacccatgtttctttagtataaagttcagggtgatcatcagggatgctactcttgccgcagcctaactggtcgtacatgataatccgtcggttatcaatttcggctaatttgtccaaaacctcaaaataattatgacttgagccgggaccaccatgtagcaatacgagtggtgtcttttcgcttcttcgaccaacaatacgatagtaagtttcatagcccatgaaaggcatttttccttcgataatttccattttttcacctatttgaacaaaaacaatgagatattaaccaaaattagcagggtaaagaagattacccaatctctagctggtaaaggaatagcgatgatcgtcgaccttctttgcccttcgacatagccatgtgattccattccttgggccagattgtcagctgaatttaaagcaacaagaattgctttaaaatagaggaccggcgaccaaaaactgagataaatgccccgcatcatagcgctagttcggatctgtttaaccgccatcttcatctgcggaataatgttaatcgccgccagcacgccgtaggcaaatttactgggtaagtgcaggttctgctctaatgatcgggcaaagtctgtagcggtgttattacgtgtcacgcaggcaatcgtcaaggtataaacatagatacgcgttgacaaattccaagcataataagcatttggtgttggtgaaaaccaaaagagcgttgcaaagattgtaaaagcagcaataaagggcaagataatgagcaagattaactctttgattttgaatcgagtaataattaaataaactagcgcgaaggtgattactaacaaattagtaactaagctagcttttaaagatatttccagggaaataataaatgctaaaagaaattttaaactaggattcataagcttatctttctacatattttaagcgctgatccgcaaaaatcaggtggtaatcgcaaaattcagctagctcgtctatctgatggctaatgataaaaaacgtctggtggagcttttgctggctttctcgcattaattctaaaacgagtttgaccgagttatggtcaagtccactgagcggttcatcaattaataaaacctgatgcttagtcattagcattaatagaatctgtaatttcttctgttggccacctgagagagaataaacaacttggtctaagtgtttggctaaacccaatttatctagccattcattgaccttttcttcagtaaaaaataaatttctatcctttttacttaattctagttcatctttgacagtcacagctaaaaattggtcgcttgctttttgaaaaatttgagctacttgtgttaaatattttctagctgagatttgagcgatttccttatttaaataagcaaaattaccagtatacggaatcattttggtcattactttaaataaagacgtcttgccaacaccattagcaccagtaattagggtagtgccagaatgcaaatttagctcattttgcttaagcaaaagcttgttttgtctaatttggacttgttttaaagtgaaaataggctcactattaggtaagacaaaatgataatgtcgctcatgcaattttttattttgttcaaataaggctatttttttgctagcatttaattcaataacttcttgattatttgtaaactcaaaaagatggtcgcagacaggttcataatcgtctaaaacgtggtcacttaaaataatagtttttccgttgtgagctaaaatcgctaattttttaatcaaaaaagcacgtgtcttaggatcacaactggcaaacggttcatctaagagcaataaatctacatccatagctattaagacagctaaagcaactctttgttgctgaccgcctgatagagtattaatcttttgatcgagaaggtctgcaatttgggtgaaagctgttgcctgatctagtcgtgtttgatactcaccttcatctaactgtaaattttctaaagcaaagacaatttcttcacgtggagttggcattgtaaactgttcagccgcattttggaacatcattgccgccttttgtccgtgcaggtccaccatacctgttagtcgccctgcatatttgggatacaaaccagcgataattttgagtaaggtagatttaccgcagccggtcggtccaattaacagagaaaaaccatggggaatttcaatatttagatgattgataataggttctttttcataagaaaaagtaagattgttaacggttactttcataagcttgattgtacaagatgctttggggactgtctacaggtagagtttgttataagtagaacaaatcataaataatacttaatactaaataaagttttgatttataatgtaattatagtgttaccatattttatttaatttaaggaaggtggacatatggcagctgttgctttggaccaatatctggcaagtgtattaaagtcaaattcaacagataagaatgaaataaagttggaagctggtaatccagattttgatctgtttactatctaccttgaaaatcataatactggtattcatcgctatcggatggatgtttcaacgattttatatattgctaagggtactgtgacaattaagagtggtgaaaagatcattcaaatgaagtctgggaatgttttgctactgactgaaggttgcaagtatgagattttaagtcaaaaacctgatacggtactgataaagttgaagtttaagcgtggatttctatatcgcaagtattttaaagattttagctgtaagggagaacgtgaggttaaagttattgagcaaatcgttgatagcttagaaaatgaacatgttctttggctaaaaaataatcaaattactcgtgcttctcaagtgatgcaacatattattggcggttatttgaataatgatttgtttactaaagctttaattcaggctgagttgaccactatgttgattatttcaattagaactcagcgcatggcaacaccgactagtttggataaaactaagtttgaaaagaagaccttagataattacatcgatcttcattttgccgatgtctctttatctgacgctgcaaaatactttggcttcaatcctaattatttctctaatatggttaaggctaagactggcaagagttttgtggatcacgtggatgatcgaagaatgcaagaagcgcgtgaattgctggctcagcctgatatttcacttagagagattattggtcgagtcggatattcgagtaagtctttcttttataagaaatttaatcaatactaccacataacaccagcagcgatgcgggcagaattgtttagacaagcaaatatcaatttaaagtaaaaaaataatctggacgaaagttccagattattttttacatattttctaagcgtttaatgcggtctgctgttggtgggtgagtatcaaacaagtgcgtcaaaccgtgattgtggaatggattttcaatatataatccagcactactactatcagctactttcattggttggctattttcaatcttgcgtaaggcagaaattaagccttgcggattacgtgttaatttaactgaagatgcatcagctaggtattcacggttacgcgataaagccatttgggctagggatgcagaaagtgggcctaagatcaacacaaagaccaaggcaaccactttaaaaattatggctaaagcattactgtcacggtcatcgtcgtcatcactgcgcacgccgccccagaaccaaaaattggacgccatattagagataaaagaaatgaccccaactaataccacggcaattgttgaaagtaaaatatcgtagtttttcacgtgtgataattcatgccctaagacgccttcgagttcttcacgatcaagtaattctaaaattccttgagtaactgccaccgcactatgttcagggtcccgaccagttgcaaaagcattgggactaggatcaggaataatatagacccgtggcattggaacctgtgccaccatcgccatatcttctacgatatgccacagttccggattgtcggcttcatgaatttcttgcgcgtgattcaagctcataatcatgttggctggattttgccacatgatgaataagtagactaaactaccgatcaaagcaatagtaacgcccattgttggactattgctccaaagataaccgattcccgcaccaactaagcctaagatcaccaaaaagatgaacataattaacgccgttttgcgtttattacgagcaatttgttggtaaagcatggttaaacttccttaaaattaaaacttaacttgaggcacattcttttcttcactaggagtttctaagtagttaatcttagtaaagtggtgccacttggcaacaatatttgatgggaaagtaagcaacttttgatcatatgttgctacagttgaattataaagttgacgagagtaagcgatcttgttttcagtgttagtcaattcttcttgcaattttaagaagttttgattagctttcaagtctgggtaggcttcagccaaagcaaaaattgacttcagagaatcagtaatttggttagaaagcttcatcgcttcttcatggttaccttgaggcacattaaccaattgattacgtaatttgactacttcctcaaaagttgatttttcatgcttggcatagcctttggtggtttcaaccaagttgggaattaagtcattccggcgcttaagttgaacgtcaatttgactccaagcttcttcagcatagactttcgctctttgtaaaccgttgtaagttactatgtagatagccacgattaaaacaataatagctaaaatgatccaaattaaaggtgacatagtttttcctccataaaatatttatttaattttatcgttttcgaatttcttgagcaataaaaaagaatgtcaaagcggcattcttaacaaaaaatattaaattctgaagattaatagtaataatccaactgcagttaaaataatcaaaccagcaaattgcataatagtccattgaataaaaaactttttcttacttacgctaccgtgttggttgaaagtcttaagaactaacatattagccattgaaccgatagcggaaccaaaaccatcaatgtttgaacccaagaataatgcttgagcataagtggtaaatttaccaactaaaatggttgatggtacattgctcattacctgactagagataattgaagcaaagtaagttgaaatttcagaataaacggtgccatgaattagatttacgataagagggatttgttggatatcgctgatgaagatgaagaagccggtaaaggtaagaagtaaggcatagtcgattttgagcataatcctaggattaattgcaagggctaatgcaaccgacgttagcatttgccaaataatatcaatggttctgaaaacaccaaagaagaagaaaataaagacagcagtagttatcagcgtcgggcgccagctgatcttgattggctcagctttttgcaccggaatttcttctttaggaataaacagaaagactaatcccatgattagcattgaaactactagataaggtacagaccattcgaaaaattttaatgggctgacatcaaagcggctgactgagaaaatattgtgggggttgccccaaggcgtaaatgctgccccaatatttgcgcccatcccaatcaaggtaacaggcaaaatctgtggcaatttataacgcttagcaatatttaaatacagtgggatcaaggtcaatgcagtaatgtcattacctaaaaacatccccgaaatgacagccaacaacgaaaacagcgtgttcaacttacgcgtattatcggcaatacttgtaagcttgtacgctaaaacatccagaacatgcaagtatgcatagatctggataatcgttaacatcgcggcaacagaccataatgtatggaagttaatgtccgcaaaccgcggtctggcaaaaaaaagactgactactgtaatgatcacagtaatctgtaaaattctatctttagcaatattctttaagacggtcataaaaggtcccccttacgtattacaatcgtctaaaaaccctatgtaccattttgagcctttttgttattgcatgcaatgataaatttaaaaaaatatcaagattagcggtatttttgagcatatttttagttagttggaactagtcgtgctatacttaaataagtaagttaataaaatttagattgaaacgaggaaacaaaatgacagagaatgcaatttcaatcaatattaaaccagatgctgcagaaatgattaaaagcaagatggatgcagatcaccaaattgttatcttggctttagatgatggttcaaccaagtattctaaaaaaggcggcacttgtactattggcgacagcttccagtttgtaatccttgctgaaaaagatcctaagtacgcgtggtgctagttaaatctttctagacaataagccaaattataagctaaaattgcaatttccaaccggctttgaaagcctatcagactacgtgctcgattgttctcggcattgtaataggtcagaagcgaaaagtcgctttcaattgttctgcgaatagccatcaattgatgatcattgtgctttttagctcctgtcatatttttacgatatggtgtccaaagttcataacccatttgttttagctgttgatgcagttctttgcctaaatagccttcgtcgccaagaagatagtaattagatggatgggcattttccagcagttcaactgtctccttggcatcatgaactgatgcttttgttacgacataatcaagaatgtaaccgtcatcgctaacaatggcatgaactttgaaaccatagaagtaaattttcttggtggccttataaccaatgttggcataaccgcgaaaaattttagcacgatagttgcgaattggttggcaaacaggtaccggaaagctgtcaatgatcaagaaatgtccattcaggtcaacctttttattcatttcttgccgtatctgataaatcaattgcaatagctgacgtgaacgccgattaaaacgtgagtgtgataaacaattgaaacattcacagaatcttctttgtgattcaattcctgtcttagcttgccagataagtaaagccaaaatcagactgtccgtagttttaatttgatcaatatttcgccgatgagtaaactcagccggtgcatacaaacgataccagtgccgacaaattatcactaaatctttaaaactaacttgtaaatggtggctaaaacgcttaagcttaagacagttcaatcagatcagactcttttctattattactatttacaagtcgagtctaacaagattggacttttttattaactaaaacgatttaactagcaccatgcgtatcctaagtataatatttcaatcgaaaataatgctggtcttgacttgtatactgctcagccggaaacaactttctttgaaccaggtctagtggtaaatgcacgcaactcaactttgagtttatcttcagacagcggcattattgatggtgggatgaccgttacccaatatgaacctgaagcaattactgctgatgatctaaaaaacggcggtcaatgttaaaaaaataaaattaatcatagggacgagggaatgacctcgtccttttttagtatagaattaagaaagtgatttcaatgtaaggggggaagaacaatgacttttgtcaaagaaataaaagcaggtagtcgtgaattttgccaaaattggctgcggtatctgctactttttatgggattaagtttatttaatcaatttattgttattccactttttcgctatattacaacctttgttttgcaggctagtgctattccgttcgtatcttatcgaaatgtagtgacgatcattacgacgcatacggttgcctttttaattttgataattgagttgctgcttttattagtaatcttgtatgcgcaattagcttatttacttcatggcgtttgggatattaagcatcaagtttttacgtggaaaaatagttttattcaaacttggcaaaatatcaaaaaaattcgtttgggcacgctttttattttgatgctctattttttattggtagtaccgttagccgatgtcatctttagaacaccacttttaagcaaagtgcagatttcagaatttatcttggattatctgacgagaacgccaatcttgttagccgttttgattgcgttttatttagccgctttgatccttggtgcaaggctagtatttgctttacccatcatcgtttttgaccacttaaagtcagtgcaagcagtaaaaagaagttggcgattaacggcgcactaccgttggcggacgatttgctggaggattattgttttagccgttttatctgcagcagtcatgacaattttctatttagcaatgtattgcctgcagctattagttgatttattacctgggaaatgtccgttaattttagccattagcaatctttcgcttgttcaaattattagtgaagtagcgttagtctatgttagtgtactgggcttatctattattttgaaagctttaaggcaagaaaagataagtcaaacaggtaaaactaaaaagataattctaagtacattagttgtgtttgtactagtaatgattaatgcaatatctaccaattatttatatttgactagtgtaaatgctaaagcgccagtaattatttctcatcgcggcgttgatgataaaaatggcgtacaaaacacgttacagtcattaagaaaaacggctaaagaaaagccaaactacgttgaaattgatgttcatgaaactaaggataaaaaatttatcgtaattcatgatgagaatttattgaagctaacgggagttaataaagccccgaatgatttaactttacggcaattagaaaagttaactgccaaagaagacggctatcatgctaagttagttagctttgatcaatatcttgaggaagccaaaagactgcatcaaaaattgctaattgaaattaaaacgacggctaaagattcgaagaaaatgctgcagcgctttaatcaaaaatatggcaaaacgattcttaaaaatgcgtatcaagtacaatcactcgactatcgcgtggttgaaggactgcacttaattaatccacgtttggttgtcttttacattcaaccttataattttacttatccgcaaagtgttgctagtggatattcaatggaatattctaccttgaattcagactttatttggcaagcccatttgcaggatcgtcctgtttatgcctggacagttaatgacgaaaaattaatgaagaagatgatgtatcaacaagttgatggcttaattactgatcgagttgatttagctaaaaaggcaattaaaagtttccaaaaggatgctagttatgctacgcgaatcttaaattatattgttgtcctgcatctgtcgaaaaattttgaatctgcatgaagacttgatctgaagggctggacatggtaaactatactagattttcgaaaatctgaaaggaagtatagcatatgcgtaaaggtgaaaattacaacactggttgtgaaccaaatcaaagacctaagaacaagagaaacgcaaagaagcgtgttgctcacgtagcagcagttgttgctttcttgaacaaggccgcaaaagacgaaaacaagtagtctttaataatattgaaataaaagctaggagctgacgcttctagctttttttgtgcttactgaaaaaattaattctaagtgtataattttttacggtaagttgaataaataattaaaaaagcccaagtcctttgaatttggacttgagctcaaacaaaaagaccagtagtctgatgttaagaacaaaaaacacattagaagctggtcttttatgaattcaattgtaactgaaatcgcaaatattataaagtctgaagataattatattaagcgtgaaagaaaaataatctgtttcttcttaaacctgattaaggaaatcatggccttggctttagctaaagttgatgatgaaatgattaccaaggttaaagcacagcaagctcttagttaaaatcacgccacttaagcgttacccaaaagttacgttagttgtaccagctcataatgaagaattagttattagtaaaactacgcaggcaattttaaatttgaattatccggctgataagttacaaattttaatctatgctgataattgtactgatgatactgctaaaattgcccgggaaataatcaagcaatatcctgaacggaaaatcaatgttcaagtaattgaacgaacaggtagtggtggcaaagctggtgtattaaatgatgctttgaagattgcccaaggagaataccttggtgtatatgatgcagatgccatgccagaagaaaatgctttgtattttttaattaaaaagattttggaaaatccggtgagatataaggctacttttggtcgcaataagacgagaaatgcgcggcagaattttttaactaagtgtatcaatcaggaaattgttgttacccagcgaattcaacactgcggtatctggcaattatttaagattggtcgtattccagggactaactttattattaatactgattatgtcagatcaattggcggctggcgcaatggcgctttgaccgaagatactgatatttcttttaaaattatgggctcaggtagtttgattgccttagcctataattctgaagccttccagcaagaaccagaacgcttaaaagattattatttccagcgcttgcgttgggctaaaggtaactatgaagtggtgatcaataatttttgccatctttttgataaaagcaactggcgggttaaattagagactgtctattattcctgcacttttttctggtttaatttggcgattgttttatcagatctgatctttttttctaatttgattgccttaatcgtccatctttggaatcctgcagtagtaataccatttacaatttcgcggagtaatattttattagctcaaattctgctctttaattggctattgatggttttgctttatattttgcaaattaacctagcgatgactacgcaatatgggcaggcaactgacgaacagatttggctagccttagcatcatattttacttattcgcaattgttcatcattgtatcaattcatgcggttacttcagtaatgctagatcgcgtttttcatcgtgatagtactaaatgggttaagactaagagatttgcggattaggtgatgagatgaaaaaaagatggatgctactaggatttttactcgtaacgattgcatttaccggtattatgatctatatcagagcagataataattcagcggtgcgtaatttttttctacattcttggcataaaaattatgtagttgaagaaaagaatcttgcctatattaataccacgcctaagcaggaacaagtgacggttttatctgaaggccaaggatatgggatgtttattgcggcgcatgatccagcagttaaagaaagcaactttgctaagctagtgcagtattatttaaaacaccgggatcgtaatacgcaattgatggcttggcggcaaacaaagaaaaatggaaaatggagcagtgaacgcaatagcgctactgatggggacttatttattgctaaagctttgtttttagcggctaaaagatggaaaaccccagcatatcagcggcaagggcaaaaattaattgccgatattttgcgttatgaatataatccgacaacgcacgctttaacggtgggcaattgggccgattctaagtcgaagtattataatttaatgcggacttcagatgtattgctgacaatgtttgatcaattttatcgtgaaagcaatgattcgcggtggctcttaattaaaaaaacaatgctcaagcggctcaatcagttgagtcaccagcataagagtggcctagttccagactttgcctggctgacatcaaaagatgctaagccagttaaaggaagggttaccactgatcgatatgatggtgattattatgccaatgcttgccgggtgccaatggatttagcatttagtaaggataaattagcaaagaatactgtacatcgcttgcttaaattttttagcaagcaaaatacaattacagcaggctatactttaaaaggcaagccggtcaataattatcaatcagctagctttagcgcgccaatttatattgcggtgaatgaaaatcgcaatcaaggctatgataatttgtttgcttcgcagcaatatatttttgctaaaaaattacctaaaaataattactatgatgcagcactaacgacgatggcaacgatactgacaccggcgcatagattttaagaggcaaaggcctctttttatttgcattgaaaatcaatctttgataacatagtaaaaattttaaggaaaatgaggaggacaaaaaatgggattaaatgcatacattcaaggttttaacagtttagagtcaattgatcgagcaccgggctacttcaagtatcatcaccactcagtagctgaccactgcttcagaacagcggaattagcacaaatgatgggagatattgaagaggtaaagggcaaaaagaagatcaactggaaggctttatatgaaaagagcttgaatcacgattatactgaacgtttcatcggtgatattaagacacctgttaaatacgctactcctcaacttagaaagatgattggtgacgttgaagaaacaatgaccactaagttcattaaggatgagattccagaagaatttcaagaaatttatactaaacgtctctcagaaggcaaagatgatactttagagggtaaaattttatcaatctgtgataaattagatttgttatatgaagcttatggagaaatcgaattaggtaatcctaacccggtttatatgcaaatgttcaaggaaagtcttgaaacgatcaagaagttcgacgatttagtttgcgtacaatactttattaagaaaattttgccagatctttttaaaggtgatttcgcgggaaaggataagatgcaacgaatagcttttagcattctattgttaggggatgattaggtgaaatttcaatgtagttcatgcgggctgcgcatggactctttgcattttaagcaagaggggttaatgaatcctaagttgaccagtatttgcgacatttgtatcacgcgcaacctgaatccagaagattacgcaaatgatgcggtcgcagcttttgctcaaagcttgctttacacgtttgtcggtgcaaagaaacaagatcaatcaggttttattgtgaaaaataaaaaggaccgtaaaaaatacgaggcctttttacaagattatgatggcaatgaaatcgcccgccaacagattaaaaggtctgatttgaatttggcggtaattaaaagcgaagatggcaagcttaattatgtgcctaaccaaggcgtaacttttgagcaaaatttaaagggaatgggtttggagatcaatttccagttaaacgaagttgattttattgatcgtgaacgcattcgggccaagtataaataccgctgccaatattgcggcagacgtggccacagcgtagatcataaggatcccgtttctcttagtcacaacaacagcttagataatttaactttagcttgtgcggaatgcaaccgaattaagtcggatatgccttataagttgtttattcaactgaatgatcaaatttctgagatcaataaaaagctagttaagtatgaagatgcgctgggtactttgagagaagaatttgagcatcgtcggcgctatttagcggctcaagtacaccttaagggtgttatcaatgatcctgagctaaatgcgattagaaagcaaaataagagcttacaggatgacattgatagtttacaaagtgattatgatgatttgcgtcaaacgcgcaagacgtattttgatacgggctggaaattagctcgcattaaggaaaataaggatattatttaaaacgtaaaaaagcgctattttttgtaaactcaattcaaaataaaaaatgagttttaaaaagatcatccccatataggaatgatctttttaatttttatctatctaattcgatcttctggatcaaataaatatttgtcccatttaacttcattttgaacagtagggtggaagagcaagaatgctagcaacagttgaccaacgtaaggaattacgcccagccaccaccaaccaccgttaaagcctgcgtcgtgcagacgacgaacagtgtgacctaattgtgctaaaaaggcccaaatagctgctgcaataaagaaaataataaaaatgatgaagattacaccgattaccttggcatcgccagaatcaaattcagtaacgctgaaaggagctaaaagcatgaaagcaagtaggtaacaagcaaatacgccgattgtcatgataacttggctaattgcagtacctacccagaatgaggttctagtagatctagcatcccacttaaagcagtcaaagaagtgttccttcaagatttgaccaatagttggtacaggaacattactttttgcgccacccttaggataatcttgatcgctgaacaagtatttgccccacttaacttggcgttgaacagatggctgcaattcaagataaaataaaaacattgcgccataaccagtgaaggcagcccagtaccaatagccgctgtagccaacatcgtgcaaacgtcggatcgtttgtcctaatgcagctaaaaatagccacagataaacaacagccgcaacaataccatcgactattctaatgccggggttgatgttttggttaaaagcatagaagccaagaaggatgcataagatgccgataacaagattaatcaaagtgctccaccagaaagatttacgcgtagttcttgctttccagttgaagggatgcaaataagcctcgttcaaaatttgcgcaaaactttctgcaggcggcagtggcagactttcgtcataaggcttgataaaataatatactctatcattcattttacttcctccaaaaattaatttgttataaattatacgctaaaaaagccgtgaagcaattaaacttcgcggcttttttgatattagaattcattatttctaaagttgctcaagaacttttgcgtcttttcattcttaggatggtcgaataattcttccggtgaaccttgttcagtaatgataccgtcactgatgaacaatacgcgatcagaaatactcttggcaaagcccatttcgtgggtaacgatcaccatcgtcaaaccggttgtagcaagcttttgcataacgtctagtacttcgccaaccatttctgggtcaagggcactagttggttcgtcgaacaataaaacttctggattcattgaaatcgcacgggcaatagctacacgctgctgctgaccaccagataattgttgtggcttagccttaatgaaaggatccatgccaaccttttctaggtttttcatggcaatcttgcgtgcttcatctttagaacgtttcaagactaattcttgaccgaccatgcagttttctaaaacatttttattttcgaatagatcaaactgttggaaaaccataccaacctttgatctaaaggtattgcggttatagccgggatgcaagatatttttaccgtgaaaatcgatctcgccgccagttggttcttcaagcaggttgatacaacgcaaagtagttgatttaccaccaccagaaggaccaatgatcgttacgatttcgcctttattgatgtcaaaggaaatatcctttaatacttggtgatttccataagacttttgcatgtgctttaagcttaaaattacttcgtttgattcagtcattaattatttgcctccgcatcttttggagtaccaacttggacttggttagccatcaagttgtaattcttattaccttcaagtctcttttcgataaagttgaagattctagtaatagtaaaggttaagatcaagtaaattgctgaaatcattaagtaagttgggaagaacttgaatgattgactggcaatagtagtaccaacgaagaacaattcagaaactgagatgatactcaatactgaagtatccttgatgttaacgataaattcgttggtgattgatggtaaacagtttctaatagcttgaggcaagatgatatgccacattctttggttgtgggtcataccaagtgcactagctgcttcgaattgaccttctggagttgaaataataccaccacggataacctcagctaagtaagcaccagtgttaattgacacaataatcaaagcagctacagttctatttaaattcaagtgccagaattgggcaataccatagtagattacggctgcttgaaccatcattggtgtaccacggaagatttctacataaacagataataaccacttaactacgttcaaagtccaacgcttgccgcgagtagttggagtaggaatggtacgaataattcctacaagcaagccgataaagaaaccaacaatggtaccaactaaagctaaaagcaaggtcatgccaatacctgacataatcatgccaccatattgcttccaagtagtaactagccagttttctttcttagtttcgttaccagccttaggttgttccttgatggcttgtgacattaattgatcacgctttttattagaaatagttcttaaagtagcgttaacttcatttaaaagcttggtattaccctttttaaccccgatactagttacggaatcgtcatggtcaactttgaagccagccattttgtttaagttaactgcaataatgttagggttaacgttgtggtaactttcaaattcaatatcttcagcaacataaccatcaatggtgccagaagctaaactttgacgcatggctgaaaagtcacgcatagctggttctcttttagcaccttttaattgcttgattaaatcgtagtgcaaagttccttgttgtgcggttaacttggcacctttgaaatcagtcaacttcttagcattagaatatttacttgccttattagtaattacgacgaaagtacttttacgataaggttctgagaaattaattgccttgcgtctttcggcagtaggagacataccagcaataatcaagtcgattttgcctgatgtcaaagctggcaatagaccatcccattgagtcttttctacgattacttttttgtgtagtcgtttaccgatgatcttggcaatttgaacatcataaccattagcataggagttagaatcatcaattggaacagctccattagctttggttggctgagtccagttgtatggaggatagtttgcctccatacctatttttaacgtgccagaatctttcttagcagcttgagtctgattgctactaagagaaaaaccgataaataaactgagtaggacagacattattacagccatccatctaaatcttgacttcaattataaaacctccaaaaatagttttaacataaagccaacacaataaagagtaaacaaaaacctcgctcttccaaagaattgcgagggtcataatcatcagtgtttaaaccaaatcttatagcgctccctgggaactaaccaggacagtctatagaatattcttctatagcccaacagattaacacgcgaatattaaatctatttcggcggcaaccctaagttaactatcattgttttcgcgaactcaaacttaacttgtgattgtcgcaacctctattgcattggaaaaatatttaactaatgaagaatactagaagaaaaagttaaatttgtcaagcccaaccattattagtttcataatttctctttttcatatcagaaacataaggatttcctgctacataaaaacgtaattttttgttagcccaaacgggatcagattgattgataccaacacgcgctgcagcaattatttcctggggaatttttttatgacgatcatcaagatcaatggcgaaaggggagtctgataaaaagtgcaaattccaatttttatcatgaataccaaaagcttgcatcatttttgcgggaccattagtcaaaagaacgccatctttaccatgacggttcttgatcatggtctcaattcctaaagtgggatcgattgcacggattaaaacaccctgtggttcattctgaaccctagtggcaacatcaaagaaaaaatattgacgttgcgcgtagatatagatcgttccgcctttgccgtaaagtccttcattcgctgggctacgacgaccgccataagaatgtgcagcgcgatcctttttacccatatatgcttctgcttccacgatatagccgcctaatttttcttgaccattatcaaaagtaagcattcgcccaattaggtcttttgcaatataatcggtagtgttagtagaaaaataagttgaataattcatttttgacctttctagaaaagagataaaaaataatgacagaaattaaattagttcgaatttatgaccatgagcaacctgctggttatcggattttagttgaccgtttatggccacggggaatgagcaaagttaaggccgatttagctgaatgggataaacaaattggccctagtaaggaattgcgtcagtggtttaatcatgaagatgaaaaattccctaagtttaagcaaaagtatattgaagaacttaatcataatgattatacagcggaatttttgcaagatgtaaagaagcatttggctaaagaagatgttcttttcttatttggtgccaaaaataaagagcacaaccaagcagttgtactcaaagaatatgtattaaatacgctaaacagttaaatatgtttgtgaccgtgttttttaactttccaaaagtggaagagaattgtcaaaattaagatcgcaaagacaataattgcaaaaacggtgtttggcaactcaaatctcaatggtggcagagctagtagcaattttaaagcgatgattcctatcaataagtaagccattggctgcaattctggaataatatccattaatttaatgataatttcggcaactcctctcatacagagaatgccgatcatgccaccgattaaaacaacaacggggttatcagacacggctaaagcagctaaaacagaatcaattgaaaagacgatatccattgattcaattgaaataaccgtacgccagaaaagagatagcacatgtctctttttctttttgcctttgtggcgagctgcttcgcgctcttctttttctttctcatgttcggcagcttgtttagggtggcgttgatcatagaagaatttaaaggctaggtaaaaaagataaatactaccagctaatttaatctcccaaaagttgatcagataagtcccgattccgataacaataaagcggaataaataagcaccccacaagccataaaccaaggacttgcgttgttcagctttattaggtagcacctgtgtctgtgcggccaaaacgacagcattgtcgactgataacaagcattccatcaagattaaagtcagaatgatcatccagtctttgccactggttaggacatgtaaccagttattgccgtcaaaaaagggtgcatatagtttaagaattgacatgtagttgcttcttttctaatttaattaatctgattttttctttttgtcccagacgataagtcccaactttattgttggataaaataactctttggtcaggaataaaaatcaaaacagggtttaatgctacggcgtgtgcaactgagcgagaagatgtggcttcggctagtgaattggcgacgtcaccataagttaacgtcacaccataaggaatatgctggacaacggctaatacctttcgttgaaattcagtgccgaattccgaaatatcaataggaacatcaaaattctttctgataccagcaaaatattcctttaattgtttgatatgaggtgccatctttttagggtcccgcaccaacatgcggtgagggtagaagctaaaaataggtgaaacagtttcatctcctttaagtccgacgtaagttaggccggcttctgaagctgttaaaaagtaggtccatggctcaattgtaacgtaatcatagtaaaaaaactctgtcatgtgtaacatctttattaaaaataattagtctaagaataacaaactaggaaagttaattcaaattctggaatgctgttaatgcatccccaattatttgcgtgacaccaggggtaggaatttctgtcttgttgatagagtaaattttggcgtcttctttgcgataagccaagagctgggcaaaaggataaactacaaaactcgtcccacaaatgatgatcaagtctgatttttgcattatttcaacggactggtttaatactttcggatcaatgccttcgccgtataacacaataccggggcgaataattccgccacaatctttgtgtaaatagcttttagcatattcttcataagaaacaggttgatgacatttagtacaataaatattatataaattgccatgaaattctgttacatgttgattgccagccttagtatccaaagtatcgatattttgggtaattaaattacctttttcattacaaaaatgggcgattttttcatggattaagtttggtttagcagtaggaaagtacatattgttcatgacaaattcatggaaaaattcaggtcgattgaatagcgtactatcgctcagtatagtttcgggactttcttgcacgccatcatagattccgtttttagagcggtagtcagggatacctgagtgggtagaaacaccagctccagttaagaatacaatatgttgggcattattaatatctgtttgtaattctgctaaatccatcatataatgtcaccctccgtgaaagtcactactttaattataaatcattgttttgttataatgactgaaaattgaaagcaccaaaatcaagctcaagtcctgtcactattgagctttcttagacgtaattagtttttatatgatctgtttcagtgcaatttgtatgaatcgtggcagttggttaataaagtcattgattacttcatctatcttttcaaaactattctgtttaagctcttttaattctgaaattaagtagaccaatgcatctacgaatctaatatcaggtaaggattcgttcattagatagaataaatctccgattgtcttatcatctgtattttgtctttcctgccaggtcaatagatcataagttattgctgtaactgcgatatagccacattggccatcatagctttgaacttgagatttatctaaagcaagatattgcttagacgtcttaaaatatgtttcaatttgccatctacgaccataaagttggatgatttcttcagggctaagctttgtctgagtagtagctaaaaccaaatacttgttcttgtttccacggttggagacaaagacgagctttaataaaaagctatgtccatgatattgagcctcaactatgcttgaataaagataatgtttctttttacggatgtttgaagcagccaaacgatcatacaagtctttaacgctatagcggcgatggcgataaatgtaataaatctttgaactcttcttgatcatgccaagtccatctaaaccgatcttctttaaaatccaaaacattcttggagaagaaaaccaagaatcgaataagacgtatttagcttctactcctaatcgtaaggcttgtctaatcaactctacagttacatcattcatctttctctgagcttgatttctccttttaccagaaattgaacgttcatcagcagtaatgggagcagctccaatcatatttttcttggttttggttgacatcaaggcaaagttaaccggcaagaaggtattgccatcgctccagcctaaagttaaaccacgatatccgttcaaatactcatgcttgtcatggtcatagactttagctagcaattcggtctttttagaaaaagaccgagccatcagcgtatcgtcaacgataaaagcaagtcggcgtcttttatcgataaatggttttaagcagccaatgagccgggctgcaatcaagcataatagtttttgccagttgattcttccatcgttaagtacattgcgagcagttctaacggaaaaacgtttgtcatccttagctctgaataaagaaagccgagcaaaatgtactgacatcagccaagagataatcatggttaatgaaacggtggatttacgcttaaaattgacttgtttagttaacttagctagaccaattagattaataaatgaagaaattaaggatttagtatcattttctgtgtcgatttgttctatactgttcattgcgcaggatctcctttactttttaggtcgacacttaaagtataacgcagagagagcctgcgtttttatttttgataagaaaaagccaagaggcgcggggaaggagcgttaatcttagctttcaagtttcagtataatgattaaaataactaaattgaggggatttttatgaaatatatgacgtatttttatgtagcaattgatattttattagtagtttatgcttgttatagttggtattggcaagctaaagttgattttcgtggtcgctatcgtatctcctcagttgtttgggcgctaatttttatctggctgggctttacatggaattacattgaaaaaggtgatccaggcctgagcgtcttcttggctctttttatcttaattagtattgtcgatggtttttcaggatttagtaaaaagcggatggtcgtttcaggctacttcaagcgtacagttaagtatgatgatttagccagcgctactttaatccagatccccaaccaagagaagccattagtgatggcgatttttcgaactagcgatggtaaggcttatatgatgcgctttaataatgaagttaatagcgtaattaagcaattacaagaatatgctggtcgagaaattcctgtcgaagttcaatcaatgatgtaattacaaaattggagaaagcattcgcgagaatgcctgcaaagtccgcaatgcgcgactttgcttttttatttcttccttagttagtaaatgcgagtgtttcatatcttcttcaaaagctgccaccattttctggttgaactttttatcataaaaaacggcattatcttcaaagtttaagttgtaagaacggaaatcttgattcattgaaccaactgaagaaaaatggtcgtcgacaatcgtcgttttggcatgtaaaaagccatcttcgtagatataaattttgacacccaagcgagttaattcgttggcataccactgtgtggcgcgataaataaaggggtggtctggcttacatgggatcataattcgtacgtcaacacccgatgaggcaattgtttgccacgtagcaaaaacggcatcatcagggattaagtatggtgtttgaatccataaccgtttgcgtgccaaaagcattagccgcatcataccgttacgcatatatggtgcataacgatcaggcccgtctgaaatgatttgcgttgcaacgtcgccttcgtggatgtttttttcatcaagatcaggaaatagagtggaattgaaacgtatgagctgttgattattagtgatagaggcattccagtccatgacgaaacgctcttgcaaaagcagagaggcagaaccaacaattcttacctgactatcacgccaatgaccaaacttcttttttttgcctaaatattgatcaccaatattaaaaccgccagtccaagaaattcgcccgtcgatgacaacaatcttgcggtgcaagtggtagttaatgcggtaacgggtgatcatgttgcgtgaagtgacaaaaggcaaaacttccccgccagctgcccgcaattgatcgaaccatgctttagtagctcccattgaaccccaggcatcataaattacgcgtactttaactccttgttttgcttttttaatcaatagttgcaaaacacgattgccgatattgtcgctataaaaagtgtagaactcaacattgattatttccttagctcgtaccatgtccttaagcatgtcatgaaagaaggtttcaccttcggtatagagcttgacctgattatttttagttaggggagcttcttgttgatggttaaaaaagttaattgctatattaccagcctttgaagtgtcagaaggactagtatttttaggtgctttagcaatcgatttttgaacatttctcaagccaatgtgtttttgcttattgatggcaaaaatattttcctgggaaataccccgaccaaagaaggcataaagagtaatcccgactactggtaatactaacaggatgattaaccaagcccaagtggttgaaacggatcttctacggtggaagacaacgtagaaggctaagattgtgttggtaatgataatgattctaacaaagtcatgccaccagatcataaactcctccaaaattaaactacttttttaatttaagaaacttgtcaataatatcgattacaaacggattgtcatgcatccaactatgttcggcgtcatctttaccgcgtacttctacttcttgataaaaatgtgcttttggggcaacgatatagcgaatgctttttgcggaaacaacagagatgaatttatcagtatttgtgttatctaaaacgttgccataaatattcaagaccgagatatcaggattgaatttgcgccgattaaaaaacaaataaaggtagtgcgggttcatgacactaggccgaccactttcggtcaaatagttgacgtttgggatatcgcccaagtaagtgaccccgtcaaaaggaccagcgataaaggcacatttttttaaatgtgggaacgttttgctgcggtagtgcttcatttcagtgcgaataatacatggacaggctaatgaatgagcgactgcaatatagtttttaaaaccatatcttttagctaaaaagggcaggacgaagttgagataatagtcgatgccatagataccgactattcgctggcgaaaagcaacctgcacgataggatgcttgtcactagtccaagttccttctaatttgaaatttcctaataaatcaacggttacctttaaaaacttgggattgcccttgtcataagtagcgtgtttcaccatcacgcgagtggtataatcaccgccgcgaaagccatggaaataaataatgggtacttgttttagatcgcttttttcaatgtttgccttattttcaatatggcgcttgtgtaatttgaggaaaattcgcgtgggagcgaaggtggccatcagccccaaagaaatcatgttaaacatgctaggttcttcttggaggtcatgtttatgatctttttcaacttcttcagcatatttttttgtgttgaaaaacatttttaccaccttctctttcttttttcctataataaaagttatgcaataagtatattttaccattgggtaaagattttggaattttagaggtagaaatgaagttttatgcagtcaaaaaaggacgtactccgggaatatatcggacttgggatgcagccaaagaacaagttgatggcttctctggtgcagaatataagtcatttgaacaaattaccgatgctacagattacttagattggaatgcccaaactcagagcgatgtcctgcaaaaaggtgaagataatttacaaaacgccgtaaaaagggtgcaacaaaagagtcaagaaataaaaaaagcaccgcgaaaaaaggcgaagcagtataaccatgttaatagcaatcctgctgacttctttgcggtgacttatactgatggtggcacgcgcaatactggtgtttataagggcggtcacgttaaaaagaccgataaagcagcctgggcttatttaattgaatgggatgaccagaaagttcatggctccggtggtgaatatggtgctactaacaataagatggagcagacagcattgattaatgcactaaaaaagctgcttgagcttggttttaacgataaacatctattatttgttcttgattcgcagtatgtgttgaatgcgattaataagcattggctacaaggctggaaaaaacgtggttggagacgttcttctggaccattggctaatgtggcggaatggcaggaattagatcggttattaaaggaatttcctgatagtacgtttgaatggacgaaaggtcacgctaataatcgcggtaatgaatttgtcgatcatgaattgaaccgttatatggatcaaaaaatgtaagaaaaaaggctacactgtagccttttttaatttaaaataacgccgccgaacaaaccactaaagaacttaacgatttgatcccacaaattttgtaaccagttgcggttttcttgggtattaaatttattgaagatatttttagctccattttgaatctgactggataatttcgaagcctgttgcttgaagttaccgtccttcaatgcccctgaatcacgaatttcaattagaagattgacaatttgatttttttgattgttgttgatggtgtcacctaagtggttaatattaatttgattgttgacaatgtcgcgaatttgactgtcggtaatgttttgcccttgtttagccatctcattcttggcaccggcaaccgcattgttcaattgagcatctgaataaccttttttgtttttattatcttgggtaatcccagacaaggtattcatttcatcttgagcggcattaacttgcttttgatttaatgcattgccatttttagcataggcagcataaactccagctaatgcccctgaaccatcaattggaatagcgctagtaacataaatgttggcatcgctgatgccggcggtcagggctgcgtttttgtactggttggcagtaatagtcgtgatattatttttaccatcgtagtctaaaattttaacgttgattccgctgcctgagctggtcttttggatcatcgcactggaccaaacaccggatgaagtggtgaaattatcaccagagggatttaaatatttaaccagatctgagccggtaacagtaattgtttgataattaccaccgtttagtggggcggttaaggtctttaatgtgccttgcttttgcgcatcagttaatgatgtacctaaggtaactacaggtgtatcatcatctgctaatactggcttagtaaatgagatcatcgcgaccacgcttaataacattgctgtgagtagtgtgataaatttcttcattttttcttcttttcttcctttttgatcgaatatttattcttgtaatacggaacattatactaaatatttttcaaaagtgaattaaacaacacgtaaaactttcttaatttcgaccttattattgaagatggtataataaagagcaacaaagggggacaatatgttacaagtgcctaagttaaccatcatcatgcctgtttataacacggcgcaatacttgccacgtgcttttgatgctctgcttaatcaagttgacaagagcttcaaattgcttgtagtagatgatggctcaacagataattcggttaaggtagccgaaagctatgccaatcgttttccatattttaaaataattaaaaagaaaaatggcggcccatccgatgcacgtaatgttgggatgcagtatcttgacacaccatatgtcacctttcatgatggtgatgattgggtggatccaggctacacatccttttttattcatgcttttgaaagtcatccagatgtcagcttagtatcatgtggctattggatggattatcctgacaaaaagcaacgcgttgttggtcgaccagaaggtggctatttaacgcgcggtgaaacttatttgaagttgactaatgtctttagctcaccaatgaaaggatatagctggaacaaggcctataaaactgccattattaagaaatatcatttgaagtttgatagggatatttcactactggaagatcagatttttaacgttaaatatatttctgtggctaaaggcgtctactacacgcaaaaaccttattaccactactggcagagaaagggcagtattattcaccagcctaatattaaaaaagttgcggataatttccggggaaattaccgggtttggagcaaaattatcagtacaatgatgaaagaccgcgaggaagaaaagatgcgtaagaagttagagcgacagcaggccttgcgtgatagtgaataggggaaaacatgaaagaaaaagttaatggagtcgaaatttattatcataagttaggtaaaggtgagcctttgcttttactacatggacatcacttagatggtggtatgtttgataaaattgtggctccgctttctctttattacaccgtttacgtgcttgatatgcggggccacggccttagtgaaggcgacattgcggaacactacaagaccgaagtagaagacgtctatgcctttgttaaacaggttggcattgaaggctgctattgcttcggttttgatgcaggtggtctggtggcaatgatgctagctagaaaacatccaacgatctttaagaagatgattgtagctggcgttttcgttaatggtgcaggcattagaccatatcactacttaacggaaggctttcatcgctttttgagacttgatcgtgacagccgcgtagagttgactgagtcctttatttcagtagatgacttgaagaagattactacgccaactctttgtgtagtaggtgaaaaagactgggttaaggttgagcatgtacgttggtatagccaatttatgcccaatgcgcggttggtgattatgccacggcagacgcatgacagttatgcagtgcgcagtttaaaactgctggatttgattaaaggattttgtaggtaatacgcgtggtgctagttaaatcgttctaggcaatatgccatattataagctaaaatggctatttctagccgctgctgaaagccagctaagctccttgctcggttattttcagcgttatagtaactgagcaaagaaaagtcgctttcaattgttcttctaattgccatcagttgatgattattatgttttttagcacctttcatgttttttcgatatggtgtccaaaggacatagcccataccttttaactcggcagctaagtcttttcctaagtagccttcatcgcctaaaagataatggttaattggatgagcattaatcatcaattctgtcgtttctttggcatcatgcactgatgctttagtgactgcgtagtcaagcaaatagccatcatcgcttactagcgcgtgcaccttgaaaccataataatagactttcttggttgctttatagccaatatcggctatgtcacggaagatcttaacacgataattacgaacaggctgacaaactggaacaggaaaactgtcaataattaaaaattctccagcaacctttacctcttgattccaagcttgacggatgcagcgaattaaaggcaaaagcatcttggctcgacgattaaagcgagaatgagataagccaacaaaaaatttacagaatcttctttgggattcaattccaatttcagtttgccaaatgagcatcgctaagatggagctgtcggaaagctttgtttgatcaatgttttttcgatgcgtaagcttatcaggcgcataaagattatatagtgaacgacaaattacatttaaacgactaaaactaacttgtaaatggtgagagaaacgattaagcttgaggtagttcaattagatcagactcttttctatttaatttacttacaacttgagtctaatccgattggacttttttattaactaaaacgatttaactagcaccacgcgtaggtaatgtggatagtattgctggttaacgtgatagttgctgcagttgctgttatatttggttttcaaaatagggtagaaacattaaatctgttcaatgccggtatagtttttatcacttttgggattgttttacttttaggtgcaattcctgtttatcaagatttcagcacgtcatcaattttaatgttcattgcaggcattttaattattgttagaattattatgctagctgttagtttaattaccaaagtgccaagaacagtaaatctacaggatattgcaatttcattgatgatcgctgcagtttgtttgatatatttcatgcacggtttaaatctgagcttaagtaatttagtcgtgccagaattagcattgattattggcattattttgttttattttaaaagaaagcgtcaataaaattgattgcaaacatggacatctcttcaatagaggtgcctttttgtatataatggtggtgtatacgatttttattcagaagaggtaaataatgaacaaggaagaacttcatcaattattgcacccaatgaaagttattggcttaggtggtaaccctgcattaaatgaaaaaattgcggcaattttacaccaaccattgatcgaaactgcggttcaccactttagcgatggtgaaatccaagttaacattggtgaatctgtcagaggttgtgatgttttcgtaattcaatctatccaagatccagttaacgaaaactttatggaacttgaaattgttttggacgcacttcaacgtgcatcagctcatataattaacgtggttgtaccatacttggcatattcacgttcagataccaagactcgttcacgtgaaccaattaccgctaagttagtggctaacttgcttcaattgactggcatggatcgtttaattactgttgatctacatgcctcacaaattcaaggtttctacaatatccctgttgatcacttacatgccattccacttcttggtcaatacttcttagataacggaattgctaccaaggaagatgatgatatcgttgtagtctcacctgatcactcaggcgctaagcttgctcgtaactttggtcaatacttcaatgcaccgattgcaattgttgatcaaagaggtgctcgctatgatactgaggtccacgacatgattggtgatgttaaggacaaaaagtgtatcatcattgatgatttgattgatacaggttcacgtatttcttcatcaactaagtcagttttggcagctggtgctaagaaagtttacgttgccgcaacccacgcacttctttctaagaatgctactggagtacttaatgaattaccaattgagcaaatcgtagttactgataccattaagcacaagcgctacccagacagaatggtcagaatttccgtagaccaattgcttgctcgtggtatcgattatgtatacaatgatcgttcaatccaccaaatctttgacgaacaaaaccgtttaaagtaaaattcttattgataatttgaataaaaaatgatcctcactatgaggattattttttattcaaaaaatcgggtagataagttataaaactatgtctaaatagtaatgattgatataattgatatgtgttgtatagaaagaaaaagagaaagttagaggaatagactatggcacgacggaaaaacatgaagagacggagagttattctaggtaatactttccatctgatcagagaaaatggaatggataatgtttctttgcaaatgattgcagaaaaatcaggcatttcaaaatccttactgcagtcatactatcctcataaggctaagttaactaacgacattatccgcaatctttttaatactttaggtcaacaagttaataattatgacatggctaatagcaatcttccttatgctagaactaaggcatttatttatacgattgctatcttggggatgcacgatgagggcttggaccgtattatttctgaagcttttgttagcaatgctaccctagataattggggaatcatgcttaatgaatggattaaggaaaatcatttatttgatgacattaacgttgacgaaagcgaacttgagacaggaattgcgtttgtaactagtggtattggccgtctatatcatgatcgcaaaaaacaccatttaacggccgaagctcttgctaactatgcaacaagtgcattgatgttcagtttcttgcattgttcttctgaagaaattgatcaagccttaaaagaaggacatgaaattattgaaactgctgatatggaagttgttcaccgagcaattgatacaatgttcgatgaaggcaaggaaattttcagctaaaggggagtcgccatggttgaaggcaaaagagctgatttgcgacgaatgggttatgagcaaaataaccaatataaacgtttgttggctttcgtcatctttttgattgctgcattatcattgattacagctacttttttaaatccaatctttatgaaaaaacagattaggactagctataatagggcagtagttgttcgccaagtgaataaaaattatgatagcctagctgatttgattaatgcagatagtgaagataattcaaacttactatcggatacgcaaactcaaccaattgccgaccatattattgattattctttgggtattcattggtttaaggttactagtttgccactggctaatcagattttaagcgatatcgatcaaggaattgctaaaggctcgtcaagtggggcacaggaagttaaccgtaaactgaaaaagcagggaactaatgcaccttacgcgattattaaagccttcaatttaagtgtgatcactttaggagcaaatattgctggtttattgtttatcgttaatttgataataattattgttaccattattacaatggtttcgctactcaacgatatgaagtcgcgggctacaattcgaatggtgattcatgatacgatggctgctggcatgtgggcaggtttttggctaattttgatttcaggcttgttagcacttgtgccagtaatctttaatgtcgataatatcgaatttggctttttgcttgagattggcagtagcgtctttttggaatatgtaattgctggggtaattatttacatcatttgtgcgataccatggcaaattacagctgctaaataagaatgagaaaacgtaatctgtagaatgattacgttttttgtttgcacaaagaatcatctttctttataattaaaaaataattaacaaatttcatatgtttatattttaaaagaattgggcgagtttatgaaaaaagctaaaattataaagacttttcttgctttcattactatgctttcgactctttttttgtttaatcagcctgttaatgcagccaataaggaggttgagactggctcagtgatgaaaaaaattaagcagtcgaaagaattagtagtgggcacctcagcggattatccgccactggagtttactaccagtgaaaatggcaataccaaatatgtgggggttgatatcgagttggcaaaagatattgccaaggatttacatgcaaagctagttattaaaaacatgagctttgattcacttttggtagcgctagagacaggcaaggtagacatggttatttcggctatgacacctaatcccgagagaaagaagagcgttgatttttctaagatttattacaagccaagtggcgaatatttcttaattaacaaacgcgatcaggccaaatacaaaaaaattaaagattttgctggtaaaactgtcggtgcgcaaactggtagtattcagtattctttgattcaaaagcaaatgaaacagtctaaggttaaaggcttaggcaaaatcaacaacttagttctggcattaaaatctaataagatctctggcattgtcatggaagaaatgactgctaaggcctaccaacaaaacgacaatagcttgatggctgtgagaagtgacttgcgtgaacaacaagctggtaacgcagtagcaattgctaaaggacaaaatgacttagtagctgctgtgaacaagactattaatcgcgttgaacaaaaagatttgattaataagaaatacttgcctgaagcagctaagtatatgaagacagcgcagaagacgaacacgatgactaaatatattccttactttattaagggagttggctataccatcgtgatcacgattttctcagtgttaatcgggatcatcttagggatgctcttagccttaatgcgtttgtccaagaataaattgctgcactggattgcagtttgctatatcgaattcattcgtggtacgccacaaatggtgcaaattttatttgtttactttggtgttggagcattaatttctaacctgtcagctgttgtagcggggattatcgcaattgggttgaactctggtgcttacgttgcagaagacattcgttctggtattgcttcagtagctaaaggacagactgaggcggctagatcattaggtctttctcaagctaaggcttaccgctatgtaattattcctcaagctttgaaaaatatttggccggcactaggaaacgaatttattaccctgctgaaggacagttcattggtttcagttattggggtaactgaattaatgtaccaaacggaattgattcagacttcgacttaccgtggtgttttacctttattcattgccatgattatttactttatcatgacatttactttaactagattgcttaattatttcgaaagacggatgaaacacaatgactaaaatgatcgatatccaacatttgaagaaaactttcggcaaaaatgaggttctgaaagatatttctgcggaagtagataagggccaggttatctgtattatcgggccatctgggtcaggtaagagtactttcttgcgttgcctgaatgtattagagcgtcctacgactggtaaaattgtttttgatggaacagacttggctagtctaaaggatggtaaggaacttgatcaattgcgggaaaagatgggaatggtttttcagaactttaacctttttcctaatatgaatgtaattgaaaatattaagttggcaccgatgaaagtcaagggtgttagtgaagctcaagctgagaagactggactagtcttacttgaaaaggtgggcttggccgatcgtgcaaaacaatttccagctagtttatcaggtggtcaacagcagcgggtggcgatcgctagagccctagcaatggatccggaagtaatgctatttgatgagcctacaagtgctcttgatcctgaaatggttggcgaagttttgaaaacaatgcaagatttagctaattcgggaatgacaatggtgattgtaactcacgaaatgggatttgctagagaagtagccgatgaggtctggtttatggctgatggctatttacaagaaaaaggcacgccacaggaagtgtttgaacaccctactagtgaacgtgcaaaagatttcttatctaaagttttataatcaaaaaggctcaagcattgcttgggccttttaatttactcatctgtaatgatggggtttgataatacgtactgtcttacgaaaaaattttgatgccatcctttttgaattaatgcattaaaaaaggtgttttgattattaggcaaagcagtggctttgggaatgatgacagcacgtaaaatcttgttttgaagtaaaattggtgattgcacatctgtttcgctatttaaattagtggttgcttgattggtcggcgtgttggttgtatcctgctgaacttgataatttgtagtgtcattagtactatcttgcttaaatagcttgaatctgtacttctgcacgcctttaacgtcaacttcatattcatgtcctgcaactaggttagtatttgcgggtgaataagttaggatcgttctaaaattgccgtagccacaggagctgtaattcttaacatgagctgcagtagtaacaactttagtatctaaatcagtgatagtaattgttggcttatttttaatggttctatctgataaatagagcgaccacatgatatttttcccttgaagcaattcaatagggaaaagacgcatgctaggataagcaactaccggctgactagcaggacgaaaagtatcattaatgtttagtactttttgaacggaatagcggtagccatttgtaccataagctgccccaatgcctgtagtggttaaacgacttgaaagtagccaagctcggtgaccggtatctgaaccagttaaattataatggtcagtaattaagtcagtgatcacatccccagcggtttgctgtgaaacattaaagtttaaatttgaagtttcagaagtgtctttagctagcttccaaacaaatttggagatattgcttggcttagtttcactaggtaaaccatgttggttaatgaatgggttagcattaattgcggccattacagcagccgtaatctgcgcgtttttattaagtgtatcagtagtcgagatagcgggcagactgaacaatgatcgatagtaattgatataatctgtttgcgttttaatgtattttggatctaagcgacctaccttaaattttttgcttagatttggctttttagcataaatatttgcggcactataactagttttatcaaggttcgcatattccttttgaaaattatgaacttcgttaacttcttgtgttgtgaatgtcgctgcttgtgtaacttgtccggcgagggggataaataaagttgcggcagcggcaatagaaaatttccgtagaagcattttagactcccttctatggttgtcagtatacctttcattataaactataaccaatgaaaaggctttagtgaaaaatattccactattttgcgcttttctggtattctttgcgtataattaaagattggaacatttaaaagaggtataaaataatgactaaaaaattacaagttggtttgatttttggtggtaattcatcagaatatgaagtatcaattgtttcaggccgcaacatctataaagcaatcgacaaagataagtttgatgtgcacccaatttggatcactaatgaaggctactttgctaatgaagaagaaagcttcaaggttttagatgatccttcataccaagttaagaacccacataaggttaacaacatttctaacttaattgaattagaaaacttgccagaaattgatgttttcttcccaattgttcacggtaacttaggcgaagacggtgttttacaaggtttgttccgcttgatggataagccattcgtcggtgatgacgtcttaggagccgctgtaacaatggataaggaattcactaagatcttggctcaaagagttggtgttccagtcgctgattggatttcaattaagcgttttgaatacgacgacaagaagaatgctaaacttaactatgaaaaggtagcagaaaaattgggccgcgacatgttcgttaagccatctaaccaaggctcatcagttggggttagtcacgtaactaatgctgacgaatatactgcagccttaaaagaagccttcaagtatgacgataaggtcttagttgaagaaactgttcctggcaccgaggttgaaacagctgtcttaggtaacgacaagccaattgtagcaggtgttggtcaaatcaccaatgcaaaaggttcattctacacttatgaaaataagtatgatgataattcaacttctaagttacaaatcccagcagatttaccacaagaaattatcgatactgttagagaaaatgcacgtaaagtttatgcagcaactgaatgtagcggcatggctagaattgactccatgctcaccccaggtggcaaggtagtcttgactgaagttaacgctttaccaggctttactaatatcagtatgtatcctaagttgtttgaagaagcaggtgttccttacagcgaattgattacacgcttaatcgaagcaggtatggaccgttttgatcataagaaaactttgcttcacaagcatgactaaacgccaaaaatatagaggtagatttcaatgacgactaacaagcatgattttgaagaattggctgcaccaaaagcagctgcacaagaattaggaattagtgttgccacgttaagaaagtattctttaatcgtggagaaggtgaccggcaagagcgactattttgctcggactaagcaaaaggctcgtctgtatcatcaaaaagatattgatgacttaaaggcttttcaccgtttatctaaaaatagtggcttaactttgcaagaagccgctcttcaaatctatgctgttagtgaaaagaaacctgaacctgaaactaaagaaccagctcctaagcccgcttataacagtaccgatgtaatggatactgagcaggtggttaagttgcttaacactttgcaaaagacaatttctaatcaaaatgaggcaattaattctttgcagaagcaattgaatgtcattcaaaagcaaaatcaagatttaattgaagcacaaaagcaattagctgcgccacaagatgatttagataagtttgcggctttgccagatatttctggaattgtgagtgcggatgaacctaaaccgaagagtgaagaagaaaagcgcgctgaagttaaaaaagacatgaataagagtcaagaacaaatgcatgacgagattatgtctaaggcaaaggaaaatgccaagaagcgggctacttcaaatgttcaccgtacactagaagatatgcaattaacggaccaaaaggaacactggtggcaaaaaatctttaagttttaaacaaattgattaagaatcaagagctgacctaacaaaaggccagcttttgttttacagtaggcgtataacaattaataggaagtagaagtaatgaaatttaaatggaaaaagcgctatacgatagcagttatcgtgacaattgtaggagcattattgacggtcttgtcctattttgccactgatatttaccacaaggacgacgttgccgtgattaccgatagcaagatcaaggatactttgattgaaaaaagtgaagatgtgtataaaaatgcggatgaaactcgccagcaaattttgcacttaaaagttttatcgggtaagcacaagggcgaaacttacacgactaaaaacgtgtattatccttcgcaattgacgacgcaaaagtatcgtgcaggtcagagaatttttgtcaatatcaagaagggtgatccagcgatcgttaatcctaagcgtgattgggtgttagttttggtagtgacaatcactttagcattgatggtggctgcagtagggaagcactcactctcgctggttgtgtcaatggtaatttcgtggctgatcttttatttgattatcatttgggatgtgcatttgaatggcgcccacattattttgctgtttggcttagctgatatcgtcttttcattctttagcttgctcattgtgcagggcttgaataaaaaaatgttggcgacttggttggcaacgctgctaggagtatttgtttcttttgccttgtgctacgtgatcatgaagttaacgggtgaatcggaaatgaaatatgagaccggtgactatgcaacgcaagatccacgaggcttgtttttagctcagactttgattggaattttaggtgcagtaatggatgaggcgaccgatattatttctagtttgtatgaattaattcaaactaaaaagaatattacgatgagacagttgattcatagtggtcgaacgatggggcaagaaattatgggaccgttgattaatgtcttggtcttaatttttattgctggtgcgctgccagaaactattttgtacttgcgtgataataatactttagcttcaacttttggctttactctgtcgctgggggcaacgcaaagtgtgatttcggcaatcggaattgttctgacggttatttttgcgacaggatgcagtttgttcttcttgaaaaaacgcgattggaagagtttgtttaaaaaagaaggtgagaataaatgagtacattatttgcattgatcgttgtcttagcgattttaatgacaatcgtcggtggtgaaactggaattcgtagtttttttagtgtgctaattaatacgattctattgatcttagtggcgatgctaatatcatggggaattaacattgcaattttgacgctgatttttattcctttaaagctagttacgattatctttttaggcactcatgactatacggtagcaaagaattcattttattcttccttcttagtgtgtttgattattagcctctttattttgggttgtcaatacctggctcaagctgcaggactaggaccagaggcaggagagttattggttggcttgtcgcagatgccgggcttgagttatccgatgattgccgtgacagtggcgattttctcaactttgggtgcaatcgcggaagccgcggtagcaatgagttcgggcttgctagaaatcaagaagcataaccctgctatcggtgaagaagagttgatggcttctggtacggttattggtaatgatgttttgggtacagcaatgaacacgattttatttgggatgttcggtagttttttatcattattcttatggtatttccgcttgcattacacgattggtgaagttttaaatgaaaaactttttgtaaatgaagcgttaattatcatgtattctttgattggggttatattaacagtgccactatcatcatttatgctatcaagaggaatgagcaagaaaggaccaaaacatgagagtagaaagtctgacgctgactaactttaataatcgtgaatatcaagttcatacatatgcgctagagcctaatcctgaattggttgagcaaaagcgcccgctagctattgtagtaccaggtggtagctttaatcacttatccaaaagagaaggcgaacccgtagccttagcatttaacaatcaaggcttcaacagtgtggtgatggaatataacttagtgcaagatccagacaaaatttaccctgatgcggggttagatgttctaagtactgtgaaatatttcagagaccacgctgatgagtatcagttagataaagataagattttaacagttggcttttctgctggcggtcatgtggtcagtgtagctaataacatggctttaaataaaaattatcagacaaagtatgattttgataagactgatgttttacctaataagacaatcttaggctatccgctgattgatattaaaaagattggttttccgattccagaagatcaaaaagcaaaaatgcctgtagaggaagagattttggatagtgcattaggtgttacacgtgaaacgcccgatacatttattttccaggcatgggatgatccggtggttttgatcggaaattcgattgaatatattggtgctttgaataagaataaggattcagcagaagctcatttgtttaaccacggttaccacggcttttcattggctcgtcacaatgtggaaactaaggggcaagattggcaggataatccgcacgcggcgcactggttcaacttggcaatggaatggctaaagagtgagtggggcgaatgatgtgaagcataaaaaatcttctaaccctaatgacaatatctatcacactatcgtcaagaatagaaaaattgaccgaatgattatgccttttgaagcggtgtactgcgtgtggctaatcattacgctggttcttagctttaagctatttgcttattcgattgacgcacaatttgtgctaatttctctattttttcttagcgggtgggtttcgtcattggttaagaatcatcgcatgaagaaaagtagaaaataagataagtaaaaagagttctcgcacgagaactcttttttattagaatcatttactttttatctctaaagaaaataacttccttagcagctacaaatggtccagatgacttgtaaacctttaatctaatagctttggcatcgacatttcttaagccaacaaccttattcttgctatcagacttccaagtcaagtgatcgccgtatggcttaaagttaacgccatcgcttgaaagctcgacactaacttcaacaggatcgccttggtgatcaatctttctaggtacccagcccattcgactcaagtgttccaaatgattaaaggtgaagtttaattcaagtggcttgtcttcgctgaccccatcaatggtttcccattcacttgctaacttcaaatcagtcaagtaatcaattggatgatccttaggactagctagactgctcgtgacatgaatgtcattaattgcatagttcattggatcgggcttggtaattgcgccaaacggatctgaccattctgaaactttgttgccagctacataacgcaaacgcagggtgtagcgggtatttggcactagttcatggaaagtaaatgaattaccatcaatgccatcatgtaaaatgccgttaacttcgatttgaacttggtcggttaattgcggccaaactactgttaatgaatgagagctaatcttgtctggatcaaccattggttgttttggtgaacgcaacagtgaatccgtaatagcgtgaaccaaagtttcattgccatatctgaagtttctgatcgtaatctcaattttagaatcggtaatatcgcgtttagctaacttaatttgtaaagcagtttgtttcttttcttggtattgatcaaattcaggcatccagctgtaatttgtgttaaagaagaagccttccttagcatgggcgaaggtatcaacggtaccgtactcctgcatcgggatttccttgtcgttgattttaacagtcaaaccatcaggataaccgtcacacatgatgttcaagttggtggtgttttccgtttggaaagtattgaaatcgccttgagttgggtcgatggtgatcgtcaatttgcttgcttctaaatcactcgtgatttgtgtagctacatggtttcttgaatagtcgttatagccgttatcatcgtaagtaaccattttactcttgccttgagggtagaggacatagttgcgttcgccgaggtcaaaaatagcgccgcctcgtacaaatactggtaaatgccaggatgggtaagactgcttattataaacgcgtccgcccaagtactttttgccatcaaataagtcaacccacattgttctgtggttaggcaagtaaaggttgtcttttcttgaattgccattaccatcttcgcgaccgttaacaattggcgaaatcaacaagttaggccctaacataaattcatggcccacctgtggggtgtagttgacttgttcatgtggaaattccaagaataatggccgcaagattggctcaccgacttgagcgcggtagattagggtatataagtaagtctgcaattgctcacgtagttttaaataggctcgattaatttgcgtcatcttactattgtaagcaaatggggtcttactaaatttaccttgatcgtctaagttgaacaggattggggtaaatgccttccattcaaaatcacgaatggcaatttgagcattaccaccgccagcggtaccgtcaacggcactaccaactaaaggctggcccgaaaggctagcccccaaaaagccagcaacttgtgttggaatgttttcccagttgccgccaatgtcaccaaaggctagcattgttctattttgactaccagcaataccagtattagagaaaatcaacggccgcttacgcttcaaattgttgcgtaaaattagcgcatcatttttcaatacttttggatcggttgtgtccgtttgaataaaggtggtatcaggtgaagccttcggtgtgttgttttgactccaaagaccagcgctaacgtcatgtatagcggcgtattcactgaagctagccatggcttcttcgttgatttcttgcacatcatagttaggcacgatccaacttaatttaaaatgctgcttctggtagcgatcaaccattgcccgtgctgagaattgatattcttcttcgccattcaaagagcccttgccactagcatcttctggcttgttagttctggtgtaataattaccgtcttcaaacataacagcattacgttccttagctttaccaggctgccataaggtagttaaaaagttgccaacatgacctaatcctagtgcatatttaggtggcatcagcggcttacccgttaacatgtaatactttgccaaaatatttttgggtgaattacctaatagataaaaggtatcaaacatgttggtgtcgtgctttaagatagtggcatccggattgcttttaccaaagtcataattgccagcactctcagtattgcgcaattcaccaaagccggagttagcccagaagaatggcacttgggtcaaaacgccgcctttaccggtaatcttgtcgcgcttgattgaaatgatttcacctttatgactgaagtagccgttctgcatcccgccaccaaagtaaaattcattcttgtgttgcttcaaaatttcggtagtttgatcattgcctaattcaagtggactcagctgaaccaaacgattgcggtgcagcgtctcgtcaaagatgctcattacggctggcttttgttggaaaataagttgataattgccagacttaatgattaaggaatcgctggttgccttaggctgtgatttttcaaaatagtcattgttgaattgagacaggtcaacaaaagatgagtgattctcgtcaaacttcttagctggatcgagaaaatatctgaagatcccgtcagctaaaatataaagacgaacaatatcgccggtggagtagtgaagttcataataatgatcacgtttgttggcaccgataagttggcctagttgatgtctttctatttggttttgtgtcatatttattcttcctatttaaacttgctaccttatattataactaaaaatcaaaaaacttcttaagcaattgtatttactaatatgcatcaacaaaaaaagctctgctattatgcagagccaccgcgcgtttgcaagttatcgtcttactgcgcatgcatccatgatcattggacgcgacaatcttcctatgcacattatagcatgataaaaatacgatgcttaaactggtatttaccaattttgttagatataattaaattaacaattacgatttagacatataaagaaagaagatatttatgacttattacattcatgcagataaatttttcttagaaaacagaacagaaaacggcggctatcttgaagttcaagataatggcaagtttggctttttctatccagaaagcaaaaagccagaaggtaagattgtcgattatgctggcaaatgggttgcaccaggattagttgatacccacattcacggctcattgcgtgaggatgtaatgaagagtgattgggaaggtattaataagatctccaagggcttgcttagtgcgggggttacttcatggatgccaacaacgatcactgctgcaagcgataccttaactagaatttgtaagatgtttgcggaccatcaaggacaagaagaaggggcaaagattcaagggattcactttgaaggaccattcttcacggaagaacatgctggagctgaaaatcctaagtacatgatggatcccgatattaatgaatttaacaagtggctggacgcttctaacgggatgctgaagaagatttcaatggctcctgaaagaaaaggttccaaagaatttattcgtgaagccgttaaggaaggcatagtagttgttttgggccactcaagcgctagttttgaagaagcagtcgcaggcgttgaagcaggtgcaaccatgtttactcatacctttaacgggatgcctgatccaagccaccacacgccatcaatttctaatgcggcaatgacgcttaataatgtgaccgatgaattaatctgtgatggccaccatgtgcaaccatgtatggctaagactttgattaatgcggttggtcctgaacacattgccttgattactgattgtatggaagccggtatgatgccagatggtgattacatgttaggtgaattgccagtctatgtaaaagatggcatggctcgtcttaaggatggcgacaatttggctggatctatcttgcaattgaagcaagccgttaagaatgtagttgactggaatatcgttactccagaaaaggcagtgatgatggctagttatgttcctgctaagagtgcccatatcttggacaattgcggtacaatcgcaccagataaggatgccgacttcttgattttgaatccagatttgaccttaagtgaaacttacctaaatggtgaatcacgttataaggcttaatttgttagtctagttttaaatagtcctcattagattgagggctattttttgaccctaaattttggcaaatagtatacaattaataatagtaaagtaggtattatacattaggagaaatttattatgccagatggagactgtaaaatagtttgtgtaaggatgaatgattccttaaatttatttctttaaacattagaaaaaggagttcctttctcgtatgattggtttgaacaaaaaaaacacatacagaaagaagaactccttcatgaatgattttaccaaagattttgctcaagctctattcaatccagacaaaataaatgatttattgcgcaaagaactacaacaggctgttaataacttgctagaagctgaattgactgcctttctgggctatgatccctatgccagaaatggctggaatactggcaactctagaaatggtgcttatttccgcaaagttgatacgcaatttggcccaattgaagtgcaagtgcctcgggatcgcaacggtcaatttcatcagcacacgctgcctgactacaagcagcactcggatatcttggaaagcatgattatcaagctttactccaagggcgtgaccaccagggaaatagccgatctaattgaaaagatgtatggcagccattacagtccagctcaggtatcaaatatttccaagcagatgattccaaaggttgaggcttaccacaaacgcaagctaagcgacaagtttttctgcgtctatttggatgcgacataccttcctttgcgccgagaaacgtttgagcgtgaagcagtctatattgccattggcattaaacctaatggacataaggaagtcattgactactgcattgctcctagtgagaacattgaagtctggacagagatgcttcaaaacatgaagtccagaggcttgaagcaagttgaactctttctttctgatggtgttgttggcatgaaaacagccttggccaggacttatcctaaagctcattttcaacgctgtttggttcatgtcatgcgcaatatctgcgctaaagtacgcgtcgacgatcgtgaaaagatcatgaacgaattcaaacaggtgcatcaacagacaaacaaagaagaagccacagctgtcctgcatgacttctataccaaatggggcaaggtttacagccatgttatcagaagcttgaaagacatagaaccagatctgctggtcttttataactatcccaagcagatcagagcttcaatttattcgactaacatgattgaatcatttaacaatgtgatcaagcgcaaagctaagcctaaggcagagtttccaactgaacagtcgcttgatgcttttattggtattcaggcaatgagctacaatgaccgttatttcaatcgaattcataaaggctttggtcaggttcaggacaccttagaatcctactttgattaaataaataattaaaaaatcaatttacgagaaagaactatttacacaaaagatttgacagtttcgccagatggaatcagtcaattactagtactttttatgtaataactttcaattaattgaataatttgtactcttattgattaaagaaaagtatcacatatgtttcatgaatctcgtctagccaagtaggtgagattttttattacgtttctatgtaatcgctttcaattttaaaacaaatgtgctatattatgagtgtaaagaaattaagaaataaaaatattaaataagtttaagtaaaaggagagaggtgagttccgatgggcacttgagagtagaaagtcatatatatagaaaggtttgtgataccaatgggcatcgtaaattgaaaataaaatgtagttcaataatcatcaagtgatattaatgtacataagaggccgtgaaattattagtaggcatagaataataactatttgatgaatcacttggattaggattaagaaagattttcatacatgataaatattaataagaaatgacccttcgctggaatgaagtatgcgaagggtcatttaattttggcttgaaaaacgtttggtatttagcattattgttatttgttaaatataatatgaagtacatgtactaggccgatagagaggaaagttatgacaacagactcaattaattttaaaatcgatgcagaaagtaaaaaggtgatgattaaagaattagcaattattaatggcttaattcctgatgatgataatacagtagataatctaaatgattattttaaaaacttaggaatttaatggtttattggtcttttatctgatgtagtaaatcatgatttagtaagtcgtaatttagtaaaatataatttagaagatggtgatcttatgtttattggacgaaagaaagaacttactaaattagagcaatttaattagcgtggctaaaagatattactacttaaacttcccacacgcaaaattgcttgtttcattgtgattctgcgtgttttgacaaatataaaaggcacaagtccttttcattgctataattatattgaccaaaacataatttatttgcatgaaaggcttgtgccaatgtctattttaccatctcctgaccaacaaaatgaacaactattttcaaactcaatcatcagcttcatcaagaagtttcaggtgatcaagctgttgagaaaatgtggcttccgcaaggaaaaaggcattagcctgttcagcttgtttctttacgttttaagcaatgtctttcgtgaccgcagcttatatatgcagctgaaaatggatcattttcaagaaaatttttccaagaactcatattaccgttttatgcgcaacgttcacgtcaattggctccacttcaccacacttctgtctgcgcaaatcattaataaccacttgcgatctttgacttcagaaaaacgggctgattgctttgttgtcgatgattcctacttctctaggaccggcttcaagaaaacagaattagtcgccaaagtttttgaccatgtatcaatgacttacaagaaaggttttcgcatgatgaccctgggctggactgatggagcttctttcatgccaatcaattcagtgctgctgtcttctcagaagctacagaatatgattggcgaaaataaagtttttgatcagcgcaccattgctggccaaagacgtatgcttgcccggactaaaggcacagacgtgatggttaatttaatcgaccaagctatgaaagcaggtcatcaagccaagtacgtgctgtttgacagctggttctcaaatccacatcaaatcgtccagctcaagcaaaggaagctggatgtgattgccatggttaaggttagctccaaaatcaaatatgaatttgagggagaacgcaaaaacatcaaacagatttatcgcagctgtaaaaagcgatgcggccgttctcgctacctgctgtcaatcccagtcaaagtcggacgccaggacaaagacggtgctaaaatagatgcacggattgtctgcgttagaaaccgtgccaatcgcaaggattggctggcaatcatttgtaccgacatgtcgcttagcgaagatgaaattatccgcaactacggcaagcgttgggatattgaggtttttttcaaaacttgcaaaagttatctaaaactaagtacggaatatcatggcctgtcttacgatgctttgaccgctcatgttgccatagtttttactcgctacatgcttatgtcagttgccaagcgggacgatgaagatgaacgcacgctaggcgagctgttctattgcatgattgatgagctggcggacattacttttagccattccttgcaattgattactgatgcaatgctggccagcgtaaagcaagtctttcatgccagtgaagcacaaatagctgaattcacggctgactttatcaatcgtttacccaaatacatgcaaaaattgttaaagaaaactagcaaaaataatatagaagcctaaagccaagcaagatcaagagattactggcttatttagtgtgggaagtttaagtaaatataatttattcaagacatcataaagagcatttacatgaagttgacagtatattcgaccatctttacctcgaaaaatattttctgattcgggattaaaaggttgatcaaaatcagagccatcaatcgcaacaactaagtattgattatctaataattgcagtacattatttgcccggctaagttctaacataatttctttaaagcattcaggctttaatttagccttttgttgttcaaaagccgaagcagtcattctagaatttatgtcaggaaaagcatgaaaaatttccgaattcaggctgccagctcccatgttaagaattaacttaatcaaatcagtggaattgagcttacgacagcgagtaaaagcttgatcagatacagagaaatcgtgaatgttgtcagcgattttattgataatactatccatcagctttaaaatatttgagtgaagggatttcataagaggcacagctttctatgaaagaccagataatatgacgaaagtgagcagaaaggcaaataaactctgctcactttttattttaaaaagaaaaaagaccgaatcaaaatgattcgatctttaaaagctgtcgatataatgtcaatgtcttaacttaatgacattgacttttcgtcttcgctttctttaatattcaaattttgggaattagactaacttctttctgatccaaccagaaatccagtcgatgatcaccaccataatgatgatccctagcaaaatgataccaacacggtcccattgacgatattgcaaagcaataatcaatggataaccgataccaccggcacctaccaaaccaaggatagatgcggaacgaatggaaacatcaaaacgatacaaggtgttagaaatcaaagctggcatcaagttaggcatagttgaaaacatgattacgtggaacttagaaccaccggctgcaataacagcttcgtttggcccttcttccaagttttcaatagcttccgagaacaacttggcaagcataccaactgagtggaaacctaatgccaaaacaccggctgcagaaccaggacccacggccttgatgaacatcaaagcaagaacaatttcagggaatgaacggataattgccaaaacaattttaccgattcttgaagtgtaccaatgcttgtgcttggtgtgagctgcccagaaggcaaatggcaatgaaataattgcggaaatgaatgtacctaagaaagcgatacaaatggtttgccacaattgtgagaccaagtcttcacctgagccattgtaaacatagctccagtcaggatggaaaatacctgagaagattgcaccggcaatttgaccagcagtggctttaataccaccgaagttaataccagtacatgaccaaacaataattacgatagtggcaattgcaattagccaatgtgcaacttgtttcttacggtcaacgggtttagcgggtaattttttcattgtagtatccattatttcattaactcctcccgtgacttagatgaaacgtagtcgatcaagacaacaactacgataataacgatgatgatcgtaccagtttgagcgtaattgaagacctgcaaagtttgttgcaagttcaaaccaataccaccggcaccgatataaccaaggactgttgatgctctgacgttgatttcaaatgcatatagaacatatgaaatgaagtaagtgataatttgtggcataactgcgtaatggataatttgcaatttgtttgcacctacggcagtcaaagcttcaattggacctggatcaattgtttcgattgcttcgtagaacaacttaacaaccacaccaaaggtgaagactgctaaagccaagataccagcaactggaccgatacctacgatagctacgaagatcgcaccaagaagcaagtcaggaatggttctgacaatgttcatgatcacacgaagaatgccagtcacagccttgttcttaacgatgttacgggcaatcaataatgagtagataaatgcgacaacagatccaattaccgtacccaagacagccatcttgatggtttcaatcaacttaggccaaacaacgttcaagtagctccaatctggatgagacatttgaataaagatgtcagcaaattggttccagttttcaaacaagacactaatgtgcgtgttagtaacattgattgaaataaatagtcctgcaatcatgatgattgtccaaaccaagttcattactttgaacttacgcttaggcaattgatttacttgttcaggcattattcatcctcctcgctgccgttaccaccattgtaaatattagtgaagacagacttaggagtatctttcatcttgccatcgtaaactacttgaccagcacggataccgattactctttcaccaaattgttgtgcaagttcgatactgtgcaagttagcaactacggtcatgccgtatttttcattaagcatcttcaagtcattcatgactctcactgaagtctgtggatcaagtgatgcagttggttcatcagccaagatgatctttggattttgcataagcacacgtgcaatagctacacgttgttgttgaccacctgataactcgtcagcacgtgcataaactttatcggccaaatcaacttgttgtaaagcttcataagccttttgtttatcttctttactgaataagttaaaagtagtcttccaagttgggtagtaagctacgcggcctaccaaaacattgcgcaaaacactagaacgcttaaccaagttaaagttctggaaaatcattccgatatcgcgacgtaatttacgcaaattcttgcctttagcacttgtaattgatttgccgtcaatcaaaatatcgcctgaagtaatatcatgcaaatgattgattgaacgtagcaaagttgacttaccagcaccagacaaaccaacaactactacgaattcacctttattaatagttaagttgatgccctttaaacctacagtaccattgtcgtagatcttggaaacatcttttaattgaatcattggcttatctgccatttaatcgtcaaactcccttaattaaatttattatttcttagttgattcaacgatcttgtcgtatttacggataacgttgaagtcactatcttttgcgtatgcgtaaccttcgtggctatatacgctttcgataactttcttaccttcctttgacttagctacagagatgaatgccttagcaagcttcttacggaatgacttagacatacttggaattactgagatagtgtcgttaggaattggcttagtaaagtaaattggaacaacttgactcatgatctttgggttgtccttcttaacgatgttacgtgcatcttcaaagacgaaggctgcatcagtatcgccgtttaatacgttcaaaacagcttggtcgtgaccagtaacagtaactaacttacaactcttagttacgtccaaacccttttgcttaagttcagcaactgggaatacgtatccagcagatgaagttgggttttgtactgaaattgacttaccctttaagtctttccagttcttgatctttgaacccttcttaacaaggatttctgcacgatagctctttactaattggttagttgctttaccacctggttgcttaacaccgtaacgttcagcttgcaaaagcaaatcggctgcgccttgcttgtgagctaaaacataaccatctggtggaagaaaacctacatcaactttctttgatttcatagcttccacaacggtgttgtagtcagttgacatagaaacgtgaactgggatacccaatctctttgaaagcatcttttcaagaggctttgcacgagcttgcaacttagttgcagcttgacttggtacaaattgaatagttaatgactttggggtataaccacccttagaactattactcttgtttgaacacgcagttgcaactactgctacaagaagtgcaactactgctaccaagattcttctaaatcttttcattatgtcctccataaacataaatacacagtgataaaacaaactactctacatcacaaaaaaagacttaattacgggtcgccaaaggcgatcaataattaagcctaattaatgacgtttctaataactaaacgaacagaaaaaacgtctttacgagcgaaagacacatcctttgcaataaattgttctgattgcataaacattatctttcactcccctttttcgttcccacgttcatttgataaaataataccagaaacattcgtgttctatcaaggtattttgcaacttttttcaaaaaaataatcgccaatgaatttagaatcatttggcgattattcttatattagttctttttcatagttggcttaagaggattgtttcccatatcggttttaacaatcaaaacatcagctaaagcatgttggtttacgtattcagtaactgaacccatcaacattctttcaactgcattcaaaccagtagcacccatcacaattaaagtattgtggtggtccttaatgaagtcgtaagaaataatgcgcttaggactgccataacgaatgtgataatcaacatcgtcaaaaccgaagttatcgtgagcccatttcttcaaactcttcaagtattcttcagaatcttgaagagtttggtaaatggtatctcctgaaatcaaagtgtcttgcatttcacccataaattgacgcgtatcgattacgttcaatacatcaacatgagcaccatcacgcaaaccaacttttacagccttgtcaaaggctctttcagctgattctgagccatcaactggaactaaaatgctttcttttgttttatctgtcacgttaattcatctcctataaattgcactagtacttaccctttattttagcataattttgaaagccgttactttttaattgattgtttgcttgaagatttgttgctaaaataatattcatgacattcattaacagaaaggggagaatttttttgactaaaaaattaactaatcaattaatcggagtaactagtggacgcaacttccgtgaacttggaggctacgaaactatgtctggcaagaaaatcaagatgcacaagttattaagaactggtaacttagccgatctttcaccattcgacaagcagtttttgactgattacggcgttaaatacgatgtcgacttccgtagtaaagaagaagttgataatcaaccagaccgtgtcccagacggcgtagaatacatttacgatcctgttttcagtgaagacttaaccaattcatccaagagtttaactgacttagatacacaagcacacgacgacgctgattttggcttcaatcacatgcattatgcttacgaagacatgatcgaaagtgaacctgcacaaaaggcatatcgcaagttcttcgatgtcttgcttgaaaatacggtggatggcgaaagtgttattttccactgtactgcaggcaaggatagaaccggcttcggtgcattacttgcattatctgctcttggcgtaccactaaatacgattaagaaagactatcttttaaccaacatcactaccaaggatttcgtcgacagtatggttgaacatgcccgtcaaaatggtaaaaatgaaaatgtgctgcaatcgattcgtgacattcagagtgtccgcagtgaataccttgaccatgctgttaaagtactaaacgatgaatatggcggtattaataactacctacgcgatgtaatgaagctctcaagtgcagacatcatgaagttgcgtaatatttatcttgaagattagaaaaagaaggctaaaaactagtcttcttttttcttaccaaatttttgctctaaaaaggcataaatcgcgctaggatcagtaaaattaaaaacttcgcgcaattcgttggctggcgtattagccaaaaaatccatcacttgagctaataatgcagcttgcccatctgggtcattatctaaaagcatgaataaaaatttaacttcaattgcttggctaggattaatcatattatgaaaagtgactggcgttttcagcgcaaccggaacaatcagtctcgtgttaacaaactcgccctcggtgtgtggaatcgcaatattaggaatatttttacctagtgttgcagtatccaatcccgttggaaaattatgctctctttcgacaatatggtgtaaaaagtttcccttaacatagccactttcgcgtaaatgctcgtaaacttctttaaaaaccaaatcttgcttagtttgattagaaataaatactgcatcaggtgcaaaaagattttgattagtcattggatttttccttactaatgtggaattaacattttcaccataagttaacaagacgtttttttcaacccaaaagatggtaaagttaaggtaaatcatttttaaagggagaaaaatatggcaaagacaaaaactttatactttggtgccggttggttcaacgaaaagcaaaataaggcttacaaagaagcaatggaagctctaaagcaaaatcctaccgttgacttagaaaacagctacgtacctcttgataatcaatataagggtatccgcgttgatgaacaccctgaatacttgcacgacattgaatgggcatcagctacctaccataacgacttagtagggattaagtccagcgacatcatgcttggcgtttacttgcctgaagaagaagatgttggtctgggaatggaacttggctatgccctttcaaaaggcaagtacatcttgttggtaattcctgatggagattacggtaagccaatcaacttaatgagctggggtgtttgcgataacgcaattaagatcagtgaattaaaagacttcgacttcaaccgccctcgttacaacttctacgacggcgcagtttattaaataaattaagcagacatactaatatagctaagcataactaaaacgacatcgctaattatctagcggtgccgtttcttttttcagattacctaaattcatcaaaaaagattccaagaaccttttctaacttttaatcctcaattctttctctaccttttgatctttgttctaatggatcatatcccaaatcttcaatctgcaatcttttttctttagcagacatttttgatacttcgtcccaaaaattagttttttcttttttcatttcaagattgccattaggctttagaattaacacaacattatcgccttttttaaacaccagtacttactccgatcacaacagataaaaataataggaaaaatgatattacatttcatcaaaactaatcaacttgcaccccacttgttctgccagttccgtacatgaatccgtaaagcctgactttgaaaacaagtagtaacttaaacttcccacactaaataagccagtaatctcttgatcttgcttggctttaggcttctatattatttttgctagttttctttaacaatttttgcatgtatttgggtaaacgattgataaagtcagccgtgaattcagctatttgtgcttcactggcatgaaagacttgctttacgctggccagcattgcatcagtaatcaattgcaaggaatggctaaaagtaatgtccgccagctcatcaatcatgcaatagaacagctcgcctagcgtgcgttcatcttcatcgtcccgcttggcaactgacataagcatgtagcgagtaaaaactatggcaacatgagcggtcaaagcatcgtaagacaggccatgatattccgtacttagttttagataacttttgcaagttttgaaaaaaacctcaatatcccaacgcttgccgtagttgcggataatttcatcttcgctaagcgacatgtcggtacaaatgattgccagccaatccttgcgattggcacggtttctaacgcagacaatccgtgcatctattttagcaccgtctttgtcctggcgtccgactttgactgggattgacagcaggtagcgagaacggccgcatcgctttttacagctgcgataaatctgtttgatgtttttgcgttctccctcaaattcatatttgattttggagctaaccttaaccatggcaatcacatccagcttcctttgcttgagctggacgatttgatgtggatttgagaaccagctgtcaaacagcacgtacttggcttgatgacctgctttcatagcttggtcgattaaattaaccatcacgtctgtgcctttagtccgggcaagcatacgtctttggccagcaatggtgcgctgatcaaaaactttattttcgccaatcatattctgtagcttctgagaagacagcagcactgaattgattggcatgaaagaagctccatcagtccagcccagggtcatcatgcgaaaacctttcttgtaagtcattgatacatggtcaaaaactttggcgactaattctgttttcttgaagccggtcctagagaagtaggaatcatcgacaacaaagcaatcagcccgtttttctgaagtcaaagatcgcaagtggttattaatgatttgcgcagacagaagtgtggtgaagtggagccaattgacgtgaacgttgcgcataaaacggtaatatgagttcttggaaaaattttcttgaaaatgatccattttcagctgcatatataagctgcggtcacgaaagacattgcttaaaacgtaaagaaacaagctgaacaggctaatgcctttttccttgcggaagccacattttctcaacagcttgatcacctgaaacttcttgatgaagctgatgattgagtttgaaaatagttgttcattttgttggtcaggagatggtaaaatagacattggcacaagcctttcatgcaaataaattatgttttggtcaatataattatagcaatgaaaaggacttgtgccttttatatttgtcaaaacacgcagaatcacaatgaaacaagcaattttgcgtgtgggaagtttaagtatttagacatggttatccaacccagacaaaaaatggatgaacgtgaggcagccttaactatgttaaagaaattagcccaacaagaaaaagatttcttagtcctgatggatcgtggctatattagctttaatttaattgaaaattgcaatcgattaaaacattgccactatgttatgcgatcaaaatccggagatggtgcttttaaagaaattgtagctatgtcgaatcatgaatacgatattgacttatcatgcagagtaacttcgtcacattattattatgtcacccataaagatacagaaaagtttcttcacctgattcttcacaaaaagcatcactataaagctgttcgttcaaaaaataccagagatcaacgctgggattttgaggatatgtgtgatgttagatttagagtttgtaagtttagaatcaatccaccaggttcagacgatgagtgggaagtcctcatcaccaatttatatcgaaatgaatatcctctagctagaatgaaagagatctatcatcttcgctggggaatagaaacttcttttagggagcttaaatatgacttaagcggcatacagtttcattctaaaaaagatcaatttgtttatatggaaatatacgcccattttgcaatgtataatgccgtgagtttatcaataattgcgagctcaaaaccgtatactcagggaaaatatcaatatcaaatagattttaaaatggcctgttgtatctggcgacgatattttagtataagtgataattcagataaaaacttcacacaattactgctggatgtggcattttatttaacgcctattcgaccaggaagaaaagataaacgaaatctaaaagttaaattagtagttggctttccttatcgtctagcagcttgaactaatttaaacgactatcttaagatggcttatttgtgctatcaaaaaagacatttatcgaataaaataattcgataaatgtctcaaaaagtgtcatcagattagtcaatgtcttaacttaatgacattggacgaaaagtccccgcttttttgttagccgtgaaatttaaattggcattgattaagatgatcattaattaatccgattccctgcaagtaggaataaatgactacaggtcccacaaaggaaaaaccatcttttttcatttgtttggatatcttctgcgataggtcattagaagcgggaacgtcatcaaagctggcaatatcatgcacaattggagtaggtacaaaattttgtaaatatttggcgactgaacaatatttttgttcaattgccaaaaatgcccgagcatttttaacagcagcattaattttcattcgattacggataatgcccttgttttgcattaatgactcgatatctttatcggtcatctttgcgacttcagagatctgccaatttttgaatgcagctttaaaattgttgcgtttatgcaaaactgtggaccagcttaaacctgattggaaaagttcgagcacaagcatttcatacaaatgtgactcatctagattaagtttgcaccattcatgatcgtgatactcctgtactgcttcgtcttttgtatcgccccatggacagcgaataatttcttgattcatatttttctctctttctatgtaagtaatgttttacccctctattatttattacgcaaaaaaatgcgattattttttgagaaattatatttttatgtgcgaaataagggttttaacagctttttttgctataattaggtgtgaatttcgaggaggatcctatggaaaaattagataccatgatgttggctgatgatttagccttatcacaagataaaattttaaatggcgaacaagactttggcgctgaagctgtttacaaagtaatcgataacttgggcgttttaaataacccaatcaaggattacttcgacatgactgaagaacaatattatgaagctgaaagcgatcacaaactaactttgatcaagatggacagtaagttgactgatttgcatgatcgcattttaactaaccatgttgatggttttgttgataaggacgagatcaacttgacctacaatcatgagaatccatatgaagatgatttatacgatccaactactgattatcgtgaaattgtttacagcttgaaagttattggtgcggttcaagcaattgcagctaaggacttgcaagaagtattgtctaaagatgctgtattatcaattggacttgccgcatatgctttagcacacaacgcataaattatttgagtcggctggtaagcggccggctttttttgcttttttgaggcgaaaagatgaatttgtttaaacacataaagggaatagttgatcgaatcgttggcgccaaaaaacgctctgcaatggataaagatagtgaattgcttgatccgatgcaaaaatatactactgttggagaatatcatgttggtgccgttgatggtacgccgcatggtaaggactatgttttaaccgtttatcaagacgaagacggcgttttgcgacaagcacttagtccagagagtacaacgaaattagcaccggaatatttacgcaagtataatgcggaactaggtcattttcgtgcctttcataataagaagacagggcgccgttattgggtggaaaattacttggataatttcactacggaagtgaaaaagcatattcgcccaggcactaattcggtcaatatcggtgtaattacagatactcactttaaagataaagatagcagcgatttttatggctttaatgggctgcaacatgtgcaagaattttcttatttagatcaatctggcttgctagatttaaaagtccacttaggtgactggatcgatggctccgatgctggcctggtcagtgaaagtgaattggtcaagctgaacaagtcttttaagtcggatcaggtgccatatttgagtatcaagggtaatcatgatgaaaatgataagtttgatgaacatcatgatttaaaagcctcatttccagaaaatgaattcgaaaatattatgtggcccgatatgtaccggcaacgaggaattcattatgtttcgcgccagcacggggtggcatactttgatttagatgacgtgcgggtgatttcagttaatacgtcagatgttccatatgaattaaataaccgcgggcaaaagcgctatgacaataagattgtattggctgtgcgtgaagatcaaattgaggaaattatcgaaattttggctaattcttccaacaaaaagatcatcttcatgtcccatgccaacccaattaatcgaaaggggtctaatgcacttaagtataatggccgctctttgcatgaactgctagttgcctttaatcaacgtgaaaaaggtcgaatgcacgctagcaatggtgttccaacagaatttcgtttatcaaatgattttgattttaccaatatcaagaatgcgagaattattgcctacttctgcggacatcggcatcgtgaagaccagtatcggatcaacgggattcaatatattttgtttaactgttctgccttgatggggccaaatcattcgctaacaactaaatacaacaaaaacttagaccgaagaattgatcaaaataatgaatttgcgggttatattgtgaacgtcgatttaaaacgacaccgcattcaatcctttggctatggtgcagcttctagacgccgggtgtatttcatttagttaaggaatagtaaaggtatttggctattacaagtgtttagcttataataaaaaggttaaagtaaaaaatagtgaatattatagcaaatattaagatttagagaattgacttaggggaatttaaattatgtgcggaattgtcgcgttttatgatccaaagataaatgaaaagcaggctgtcattggcaaaatgatggccacgattaaacaccgcggacctagttccgacgggtattatactaatgacgaggttgcccttggttttagaagattatcaattattgatcttcgtgggggtagccaacctatttataatgaagataaaactagagcaattatttttaatggtgaaatttataactttaagccattaagagaagaattaattaaagcaggccatgattttactactaaggctgatacagaagtcttacttcatggttatgaagaatggggcatggatggcttgcttaagcgtgtacgtgggatgttcgccttcttaatttgggatgacaacaacaagaccctttatggtgcacgtgacttctttggcattaagccaatgtactacagtaatcaaaatggccatttgttggttggttcagaattaaagagctttttggaatttccaaagttcaagcgggaattaaatgttgaagcagttaagccatacttgatgaatcaatacaatgacctagaagaaaccttctttaagggcgtttaccgcttcccagcgggccattggtttgaatacaaagatggtgaaatgaagacccatcaatattgggatgctgaatataaagaaaatagcctttcctttgaagaaactttgcaaaagatcaacgaagatttgaaagaaacggttgatttgtatagaaacgctgatgttaaggttggtgctttcttatcagaaggaatcgactcttcatacttgactagtttgcttaacccagatgacgttttctcagtaagttttgatgattcaacttatgatgaagcttctaaggctaaggcattagcagatattaatcactggaagttcttcagcgataaggttgatgctgatgaagcaatgcgtgacttcccagaaatgcaataccacatggatgaaccagatgctaatccgtcaatcattccactctggtacttgtgtaaactagctcgtaagcatgttactgttgctctttcaggtgaaggcgctgatgaattgtttgctggttatgtgaactacgggatgcatacgcataacgacattattaaggtctttacttcagaattgaaaaagttgcctgagaagaagcgggttaaattggcacacaagattaagagaatgcctaatttcccaggtaaagttcacatgtacaccaatttagctgaaccgagtgaattttatgtcggtcaatcggttatctatgacatggattacccaactatctttacttctaaagatgctaatagcattttacagccaacgtatcgcaataaattgactgttaacggcatttaccaaaaagactttaagaaagtaaagggagtcgataatgttaagcagatgcaatacattgacttgcaccactttatgcttaacgatattgaacaaaaagctgataagatttcgatggcccattcacttgaagttcgtgttccttacctcgacaagaagattgcggaattggctaactctatcccaaccaagtacttggttaaccgtcatgataccaagtatgctttgcgtaaggcttcagaaaaagttttaccagatgagtgggctaagagacctaagcttggcttcccaactccaattaagcaatggttgaaggaaccacgtttttacaaacaagttcatgctctttttgaagaagaatttgtcaacgatatttttgaccaaaagaagattatcaagttacttgacgacaactatgaaggtgatggctcacatagacgtcaaatctgggctatctataccttccttgtttggtacaagttgttctttgttgattacgaaaacacagttaagaaatatcaacacgtgcaacctgaagttgctaagctaatttcacagggtaaattactataattctagggagattttttgaggatgagtaaaaaatttacgccgatcttactcggtagtgatatcaacgtgtatggtatggcacgttcatttaatgaagcatatggcattaaagtgaaggccttagctgacgttcaacttgctgctactcgttattcaagcattgtggacgttgaattgcatcatggctttagtagcgatcctacttttatggacgtgatgcacaaaaagatggaagaatacaagaatcacgaggagccagttatcttgattgcttgtggtgatggctatgctgagttgctttctaagcaccaagatgaattgaaaaaggtctttatcgttccttacataaaatatgacttacttgaaaaattaatctctaaggaaggcttttatgaaattgcggaagaatatggcttgccttatcctaagactaagatcattacgatggatgactacaagtcaggtaagtacgaggatgtcccatttgatttcccagtggaattaaagccggaagatccagtttcatggttgaagtgtcaatttgaaggtcggaagaagacttttgccattcaagataaggctgaatttaaggatatcgtaactaagatttatactcatggctacaacgctgaccttattttgcaagactttattcctggtgatgattctaacatgcggaccttgaatgcttatgttgataagaaccaccaagtaaaaatgatgtgtttagggcacccattattggaagacccaaccccacaatcaattggtaattacatggcgattttgcctgagtacaatgaaaaattgtacgaagaagtacaacaattccttgaaaagttgaactacactggtatggccaactttgatatcaaatatgatccacgtgatggtgaattcaagttcttcgaaatcaacttacgtcagggacgttctagcttctacgtaactttgaacggttacaacttggctaaatggtacattgatgactatgttgaagatgccttgaaagataaggaaacagtttatggtaataagcttgaatctaaatacaagctttggttaggcgtgcctaagaagatattcaataattatgcttatgacaacgactataagacgactgctgacgaacttattcgtgagggccgctatggtactactgtcttttatgacaaggatagaaacttcaagcgctggttattgatgaagtacatgttccataactacttcaaacgttacaagacttactatgaagttaataagggtaagatctttgacgaagaaaataaaaaattaaacaaatagtttaaattgagaggtaaaaaatgcctctctttttttctaaaaaattttagctgaatcatttcccaatttaatggtcttttggttaatacaagatatattcatctatatttgaacacaatacaagatgttgtgttttatgctatgataaagacacgagatttggagtgattgaaatgctaaaagaagaatttaaccaacaaaatgtaacaaaatttaatacgcctaaaacttttgttaaacgtgatgggtcaaagtatccgttcgcaatttttaaactcaacatggttttgcataacctagatttagataatgtagcacctgctgtaattgaaaaaattgtggctaaactagatgctgctgatgaagtaaatgcacaagatgtagcagttgcttttagagatagcctaaatgagttgggttatttggatgaagctaaagcttatgtgcaataccgcaagcacgatgaagaggaatggattaaacaaaccgatactcgtgcacggttaaagcgaatggttaatggtgacccaacgattgttaacgagaatgccaacaaagatagtgaggtcttcagtactcaacgtgatttaactgccgggaccgttggtaaaacagttggtttgaccatgatgcctgagcacattgctaaagcccacttgcgcggtgatattcactggcatgacttggattacacaccactttcaccaatgactaactgctgtttgattgactttaaggatatgctaactaatggtttcaagattggaaatgcctatatgactagtcctaactcaatcaatgtggctacacatcaagttacgcaaattattactaatgtagcttctagtcaatatggtggctgttcttttgatcgagctgatgaagtgttagctccttttgcagagaaaaactaccaaaagcatttaaaggatgctggcaagttcattgatgatcctgaaaagctggaagaatatgctaagagtcaaactaagaaggacatttacgatgccatgcaaggcttggaatatgagattaataccatgttctctagccaagggcaaacgccatttactactttaggttttggtttaggtacttcttggattgaaaaagaaattcaaaaagatatcttgcgtatcagaattaaaggattgggtagagaacgcagaaccgcaattttccctaaattagttttcaccattaagaagggcttgaacttacatccaggggaccctaactacgatgttaaacaactggctattcaatgttcaactaagcggatgtatccagacgttttaatgtatgatacgatcaagaaaattacaggttctttcaaggttccaatgggctgtcgttcattcttacaaggctggaaggatgaaaatggtaaggaagttaactcgggcagaatgaacttgggtgttgtaactgttaacttgccaagaattgccatggagagtcatggcgataagaagttattctgggaaatcttcaatactagaatgcggacttgccaccaagctttagcctttaagggtagacgtgcaattcaagctaagcccgaaaatgcgccaattatgtatcaatatggcgtctttggtaaacgacttaagccaggtgatgatgttaacgagcttttcaaaaatggtcgagctacgatttcgttaggctacatcggtttgtacgaagtagggacagtcttttatggccctgattgggaacacaatgaagaagcacatgattttacaattgagatcgtgaagaaaatgcatgacttgtgtgctaagtgggaaaaagaggacccatatcattggcattacagtttgtactcaactcctagtgaaagtctaactgatcgcttctgccggctcgatacggcaaagtttggcaaggtgaaggacatcactgataaggaatactacactaattcgttccactatgatgttcgtaagcacccaaccccatttgaaaagttgacttttgaagcaccatatccatattatgctgcaggtggttttatccattattgtgagtaccctaacttgaagcaaaatccagcagcccttgaggcagtttgggattgggcttatgacaaggtaggctatctaggaactaatacgccaattgataaatgttataagtgcggttttgctggtgaattcaagtctactgccaagggttttgaatgtcctaagtgtggtaatcatgatcctgctacttgtgattgtgtcaagcgaacttgtggctacttgggcaacccattgaagcggccaatggttcacggtcgtcatgaagaaatcgtgcaccgggttaagcatatggactttggcatggaagatagtttagctaccgaagaagaagtaaaaaaaggtgagtactaatgcctgaaaaagataaaaacactcaagaaggaccagatatccggagtaatttgatcaaggttaatatgggtggggataccatgtttgtggatcctgaccaatataagccacagttagatcaccaacgtgagttaaaaagaatgcaccgcaagccgaaaaatccaaaaccacaagagtggaagactgaggattattctaaacataaaattgcggattataagccatttaactttgttgatggtgaaggcgttagatgtagtctttatgtttcaggctgtttgttcgattgccctggttgctataatttagcagcccaaaactttaattatggttttccatatacgcaagaattggaagaccgcattattaaagacttgggccagccatacgtgcagggattaaccttactaggcggagagccattcttgaatacttgggtttgtttaagaattattaaccgaattcgaaaagaatttggccacagtaaggacatctggtcctggtctggatatacttgggatgaattgcaaaaagaaacacctgataaaaaggaaatgttgtctaagatagatattctagttgatggccgctttatgaatgatttaaaggatttaaccctgcaattcagaggttctagtaaccaacgaattattgatgtgccaaagtcgatgaaggcaggcaaggttgtcatctgggataaattgcaaaaataagataaactaaagtccggaatgattttctggacttttttgctaggtgaaaaaatggaagaaaaaaatattaaacaagttgatcaaatcatgacggccttgacccaagtgattgatccagaattacaagttgatgtagtaaatcttggtctgatttatggcatcgatatcgaaggagataaggcaaccattaagatgactttaacaattatgggttgccctttatctgattatttggaacaacatattcaaaaagctgttctttcagttgctggaattaagtcttgtgacattaagctggtctggtatcccgtctggacgacagagcgtctttctagtgcagctaaaaagcaattaggtgtaactaaccatgatgatcaaattaagcaggagaaagccaccaaagagaagattatcgacttttcagtaccgatcaagaaaatggcagatgaataccctgactttgttcaaattatgtacgattgtggttttactagaattaaaattcctggattgcttaaaacggtggggcgtgtgatgaccattccattgggagctcaggcaatgaaacttgatttggctaaagtgaaaaaagcatttgaagataaaggatacaaggtaatcaatgactgataaaaaaagacaggacgcaatcctgaaaattttgcattatattcaaaacggcggcgattttgcgaccgcaaagaagatgtttcaagaagaattcgatcaggttgatgtggccgaaattacagcggcagagcgcgaattaatcaagcaggggttaaacccagcagagattcaatacctgtgtaatgtgcatgccgatgtctttaagggtaatatcaaggagaatgcggtaaatcctgattttgctactccggggcacccggtgcatacgattaagctggaaaatatggtactgaaatcattggttaatgacgcactcttgccagatttgaaaaagtatcaagcaggtcaagatacactggataaaatcagaaaagaattgagtgatttggcaacaatcgataagcattaccgacgtaaggagacctcgctttttccattaatgaataaatatggcattacagctccgcccgaagtgatgtggggcgttgatgatgatattcgcgatttaattggggatgcaagcaagattgctggtgaggagcatccagataaagatcagttggctgaggcaattaaaaaggcgagtcatgaagtgcttgagatgatctttaaagaggagagcattatgattccgatgattgacgaggtagctgatcaagatgattggtacaacgttaaacgcgaagagagtcagattggctataccctgattcgcaagccaatgaattggaagccaaaggaagctaaaaaagaagcagggcctatttctgttagcaatctttcatccttcctcattaattttgaagaaggaaggttaaatttagagcagttaaatgcaattttggatatgttgccatttgcattgacctttattgatgaacacgataaggtagcttattttggcggcggtgctgagatttatccgcactcgcgcaatgctattggcaatgacgtattctcgtgtcatactgctaaaagtagaccgttaattaaaaagatttttgcgcaatttcattcaggtgaagttgacaagtatgagtttcactttactccacacaagatgaagcgctgcttatacctacgctattatgcagtacgtgataaaaatggaaagtatctgggttgtcttgaggtagcacaagatgtgacagaaattagaagctggactgaagaaaagaaaaaaatttaacttgttgggctgtgttctagtaagggatgcagctttttcttttgccctcgtgcaaaaaatcacaattcttgctagactagattgagagaatgattaaaaagaagggaagagagaaaatgcgcacagcacatggaaaacaaccagctgatgaaatcaaattgcattggcttcttctaggccaattactaacgtggttgggttccagctttatttggccatttacttcagtttacctgcacgaccatcttggcgtttcactagctttagtgggtgtcgttttgctgttcaactgtgttgcaaatatgattgggtcatttatttcaggctggtgctatgaccatatggatccatatgtcttgctgattgtgggggctgctttagatgcggctgtcttgtttggcatggctttgaatcatagttggccgttatattggctctggatgactttaactggctttttgggtggctggaatggagcattgattaactcgattgctactagtattaaatctaagccaggtcgttatgtcttcaatatgatctactttgctcaaaatgttggggtcgtttgtgggacattagcagtaggttatctttatgattattcagtgactttattatttgtcattgctggtcttttattcgttggcgtttgcgttaacgcaattattaattatcggccaatgattcagttccacaaggagcgtttggctaacaaaggcgaatcaaagaagaaggcctttgagccgatgccaaaatacaatctgattatgtcaattggcttttttgttacgatcgctgtaatttggttgatgtacatgaactgggaatcaaacttgtctgtctacatggtttctttgggcattccttttcatctgtatagtttgttatggaccatcaatgccggaattattgtcatcgtgcaagctatcttaagtcgttttactatctttaagagcttatttagacaaattttatttggcactttgatgtttgcaatttcttttgttactttgatttttgccaaagattttgcacatttcgccttatccatggttatcttaactttaggcgaagcaaccgcaatgccgtcgattccaacttatgtcaatgatctgtcgcccgattctagtaagggcaagtatcaaggcttaaccttgtctgcatcgtcaattggtcgagctctaggtccattatttggtggtttaatcattgaagatttcggctatattcaattctttgctgttgctgcaattggtatctttttgcttttagtcatgcttattccaatgcatgcgaaactacagaaaaaactaaaattatttgtaaaataaaaacaacctgaattgtcaaattaagtgcaacagttaggttatgaagagatatattgcttgaagagttcctctgctgtgtgatattggaggattcggcgatatttgtggttaatggcatcagttgcctgttgaacataagcttttgacttgtctttcatgctcttgcccttagggaagaattgacgcaaaagaccattgcagttctcattggtgcccctttcccatggagaatatgggtgagcaaagtaaatctggcagcccttgatcttggtcatatccgcaaactcagagccattgtcaaacgtgattgatttaaaccaggcaggatgtctgtcaatctccttttgaagcagcctttggcatgtgcttgcccgatagtcaggaatcttgataactacttcaaagcgtgtggttctttcagtcaaagtcattaaagcaggctgattcttgcgtctgacgcctttaaccagatctccttcccagtgcagcggagcttttctgtcttcaacctccttaggacgctgttcaatggaattgccaagatgcttcttgtgcaaagcgtgaccgccatggctgtgatgacgcttgttcctgcgtcttttgagcttcataggcagatcaatattgcttatgtccagcaagccctgatcaatatagcgatagacggttggtgtgctgggacaagggtagcctggcatagtccttttgaattcaccaacgaactcatcgatgctggtggcatcaaatttagctttaaagcgtctggagagcattctcaaaaagacagcataatgcttcaatggattgcgctgatagcagtttttgcgacgcttctcataataaatctgtgcagtatcagcgtaatagtgctcatacaataaatagctgctgtctctttgcaggacgcttccgcgtttgatttcgcgactgattgtcgacttatggcagccaacttcttgagcgataacagtacgggaagttatgccggaatccagcattgcttgaatttgtccacgttgtacgctggttaattgatgatagtgcttagaaatgctagaatttgaattggtcatgaagatcttcctttcttgatttttcgtcacttcaagtttaggtcttcatggcctttttgtttaacacttagtgttgcacttcaattttaaatccgggaaaataaaaacaacatgatagcgttaatttttttataatgctatcatgtctttatatgaaaaatttttccactagggaggtaatttaatgtattttaacgtacgcggcggtgctggtgacattactaaggctaatacttcagcgcgtctacaagataatttatatttggccgttaactcagaatggttggaaaaggctaaaattccatctgatcgttcaagaaccagttcatttgatgggatcgatcttaatattgaaaagaacttgatgcaagactttgcagattttgctgctggtaagaaggaactgcctactgtgcctaacttcaagaaggcagttgagctttacaaggttgctaaaaactttgacaagcgaaatgcggatggtgccgcacctattcaggcagatttgcacgaaattttagacttgcgcaacttcgctgactttaacttgaaggcagcagatttttacaagaatggttttgccgttccatttgctttcagtgttgaagcagatatgaagaatactaagattcactcattgaattttggtggtccaagtactttcttgccagatacgactacttacaagactccagctgctgagaagttattggatgttttgaaaaagcaatctattaagttgttaacaatggccggacttgatgaaaaggacgcagaagattacgctgacttggcaattaagtatgacgctaagattgctaaggttgttaagtcaactgaagaatgggcagattacccagcaacttataatccagtttcattgactgactttgaagcaaaattcgattccttcaagatggattacttcttgggcggattatttaccaagaagccagaacggataatttcaactgaaccacgttacttagatcacgcggaagaattgttgaatgaagaaaactttgctgaaattaaggcttggatgctggttaagtttattaatggcgtagcttacagcttgtcacaagatttccgtgaagctgcctttccatttagtcaagctttgtcaggccaacctgagctttcaagtggcgttaagcaggcatatcatattactaatggtgacttcggcgaagtagtaggtgtctactatggtcaaacttactttggcgcagaagctaaagcagacgtgactgatatgattcacaagatgcttgatgtttatgaaaagagaattcgtgaaaattcatggctttctcaagcaactaaggataaggcaatcgttaagttgcgcgctttgatcttgaagatcggttatccagacaagattgaagaaatctatgaccgtttacaagttgatccaactgctagcctttatgaaaatgaagtgcaatttggtcgggaacaaattaagtacaatcttgagaaattgtaccaagatgttgaccgtacggtatggttgatgccaggtgatatggttaatgcatgttacgacccacaaagaaatgatttaactttcccagctgcaattttgcaaaaaccattctatgacttgaaacaaagtcgtgctactaattatggtggaatcggcgttgttattgcacacgaagtatcacatgcctttgacaataacggtgctcaattcgatgagtttggtaacatgaagaattggtggactgatgaagattttgctgaattcaagaagagaacgcaagctgaaatcgacttgtttgatggtattgaatatggccctgtaaccttgaacggtaagcaaatcgtatcagaaaacattgccgatcaaggtggtttgactgctgctgttgaagctaacaagggtgaaggtggcgacaagaaggcaatgcaagaattgtttgaaaactttgctcgtgtttggacaactaagcaattgccagaatcaattaagacgcaagtatctatcgacgttcacgcaccaggtccagaacgtgctaacgtgcaatcacaatgccaagaagaattctataaggcatttgatgtgaccgaaaacgatggcatgtggcttgctcctgaaaagagagtagtaatttggtaagtaacttttcttaatatcgagtatgaaaaattagctaaattacatataagctcctataacaagaatgactacagtgctgctactacactgcagccctttataacttattacccattaataaattttttgcactaaaaagtgtctgggaaaaaactaagtctcagatcatgaaaaaagaacgttgaatttttgtttcaacgctctttttgtatacttttagctccagccttgatattattaaatcatcacaaaataaaaaaggtggaaactaacatgtacaagaattatatcacaggtcaaactgctttaacacttaatctagattttgccattccggccaatcatttggctaatgtcatcagctggtttgtagattcaattccagaagatgttttagtaggcaagactgctaaaacgggccgcccagcctatcatccagccatgatgctcaaaatactgctttttgcttactccagaagagttttttctggcagaaagattgagttgatgctggaagaaaatctgccaatgatgatcttggctgaccagcaaaagatttcatatcatactatcaataattttagatcaagcagccatgccaatgaactgattaaaaagagctttatctacttcactaacctgttagaagatgaaggcttaatcaatgaaggtgctgcttttatcgatggtactaagattgaagctgatgctaaccgctatacatttgtctggcgcaaagcggttgaaaagtatcatgaaaagctgaaaggccaggcagttgaactttatgatgaattgattactaaagaagtagtcaaagaaatggaaaaagaaaaagttcaaactagtcaggggctaaaggaattagctcaagaaactgaagcagaaattaacaagctgactaaagagattgagcaggaaaacaaagccattcctggcggttcacctcgaaaagccaagcgacgtggactaaaaaagattctgcaccggctaagaaaagattatgtgccaagaatgcaaaaatatgaagaagccgaagagatctttgccggacgcaacagttattccaaaacagatcatgacgccacctttatgcatatgaaggaagaccacatgaaaaatggtcaattaaagcctggctacaatattcaagcagtcacgaccgatcaatatgtagttgattatgccatctttcctaatccgacagatttcaaaactttggagccggttttggatcaaatgaccgtgttggacaagtttgacaaaatcgtcgccgatgctggctatggcagtgaatacaattattcgatgctggaggaaaaatatccagacaagaagtactttattccctacactatgtatgaaaaagaacagaccaaaaagtataagaatgatccaactaagctaatcaactggtactacaatgaaaaagatgattattacattgatcatcatggcgtcagattcaatttcaaatattacagccagcgcaaggatcgttctactggtcaggtccgtgattttaaggtttatgaggcagacgagttccagctaacgccagaattggaacaattggctaaaacagctagcggccgccagcgccaagttcgctataatcctaactggcaatatttaaaagaaaaagcaaaagaagttctccaaagcgaagaaggcagacacatctatggcatgagaaaatatgatgtagagccagttttcggacatttgaagaacgtatttggcatgcgcagaacgcacctgcgaggtaaagagaaggtcgaaaccgatatcggaattgcctttatgatgatgaatttgaacaaatattgtcaaagaaggtggctgaagggccgatttttattgttaaaaattttaaagagaacaaaaaaacgatcaagattcttaaaaaaggaaatcttgatcgtttttattcatctggaagctagttttttcccagacactttttagtttagtaattatttagttttagctgtcgagtaatcctttggcttaatccgcttaatgtaagatggatttggtcgacccaggattaatggtacacgctcgattacggtatcggcgtattctaagccgaaccaggaagctgggttagaagacaagttttgcaagcgaacccgcgcttccacaagccatttttcatagccaaccaattgtgtttgtggactgatgacgtcgttaacaataacgaatgagaagtcacctacgtcacgacctgggctggtggtgtattcctgtggttgtggctcaatcgtaccgtcggcgatcaagtcatgaacgatctgacgaatgtagacattcacactagtttgcttcttaaagccgaggtagagctgaatgttaattacgttcttcgtaccgtaagtgttaacagcatattcagcggtaaatggctcgttagtaacattgacagtgacaaaccagtaagcctttgctcgtttaggtcttttatccaaaattgagtacaggatttcacgtttgatgaacttattgtacttaacgttggccatgtaaaccaagttggtagcataagttgggtaattttcatcgtgacttaagttcgttaacatgtcggtatattcatctaagcgaacgtaagcattgcgagcttcacgcttgtcacgaaccttgttgccgtaataccaaacatacattatgaagccgatagcaccagcgatgaagagtgaaacgtaaccaccatgagtaaatttagtcaaacttgaaatcataaacatgatgtcaaggacaccgaagaagatcaagaagatccagttccaaacagtgttgactttcttcattactaaccattcataaagcaggatggtagtcattaacattgaaattgtaatggacagaccataagctgcttccatgtgagctgaagtttggaaatataagacgattgcgatagtagcaacacagatacccttgttaatggaaggaatataaatttgtcctttttcgttagatgggtagttgatgttcattcttggcaagaacttcaagcctgaagcttctgcaactaaagtgaatgaaccggtaattagggcctgagaagcaataacagcagcaatagtagccaaaatgatggcaaacaatctgatgttagctgggatcatttcaaagaatggattgagcacaccgccgtctgcaggacggtaagttgggttgttcaaaatccaaacgccttgaccaaagtagttgagtgacaagcaaacaaaaacaaatggccaagaaccaataatattgcttttaccaacgtgaccaacgtctgaatataaggcttcggcaccagtcgtagctaggaaaattgaccctaaaataaaaattccagccttattatatggactgactaataatctaatagcgtaaattggattgattgcttgcaagattgaccagtcaccgaccatgttcattacgcccattacacccaaaaaagtgaaccaaaggaacatgattgggccgaaggctttaccaatgatactagttcccattttttggatagaaaacagaactagcagaatgactacagtgatggcaataaccatgttttgagtagaaacgggtacattgccgccaaagttcagtcctttcagtccttcaatcgcagttgtaactgtaactgctggagttaaagtaccatcggccaaaatagcggctccaccaattagcgctggtagaactaaccatttagctcgttttctaaccaatgtgtataaggcaaaaatcccaccttctccgtggttagttgccttgagggcaataattacggtttgtaaggtagttagtagcgttacagtccaaagaaccaatgaaattgatccaatgataaagtcacgatttacattaccaatgccgccgttgccttcgacaattgatttcataacataaagcggactagtaccgatatcgccgtaaacaataccgatggcgattagtaagccggccgcgctcatgcgtttagctttattattcattatctcgttatctcccacaacaaaattgtagttttaataaaaaaagaaaatgccacgatgacattttcccttattgtacctattttcgtctatttcgctggacaatgcaagtgagatttgtcagaaattgaatctagaatttggtgatgataaagttaatgcattataataaaaaatatgcagtaaaaaagctcccatacagggagcctttttgatataaattatgaaagtgatgaaggaatcttagtacgttggtcttcgtcccatttttcccatgcttcataagtaagcatttcttctggcttaacaccagtcttttcttccatggccttaagcaagtccttaaagttgtagtcgtggtattgtaacacatgatcaaccaacttcttgcgtgggaagtggatgttgtttaaaacatagcgattgatatcaaccatgttatgattttcatcgtaaaggttgataacttcaagatcgtcttcatcgaattcagcgatgtagaagttagcgaagacctttaagtaatcaggttgttctttgaattcttcctgtggcatagtagtcttgttagcttctggcattacgactttaaagtcgtcgttttcttcattttctttatcagcttgagcttgagcgttcttttcttcttcagtcaaagttgttacccctttatttataaataaatagatacaaagtcaataataattttacagacttctacaaataaaagcaaatagaagtggttgagagatgcaaaagtatagaagtcagttttgattagtaaaatggagtaaaatgaagtaaaatataaatgtaaaaagtaaaatgaagtaaaatgaggaaaaatatgtataatgaaaatccttttgatgctgaatttggcgggatcccagagctatatcttgattttaatgatgatgcagttaaatttgctcaaagagcccatcgtctcaagaaacatccaacttattctctctttattacaggggtacgaggttcaggaaaaacagtttttatgaacaaagtgggtaaagaactaaaaaaatataaagatactatggtagtcactttgcacaattctgatgatctttttcgaatgatgtatatcaagctagtgcctatgctagataaaatcaaaaaatggacgccatcaatttctattaaagttccttttgtatcagtagatttcactgaagcaaatgaaaagcatgatgaaatatattataaagtagaaattaacaagattcttaaagctttgaacaaagtggggattcgtgttgcattttgtattgatgaagtgtcaaatacacccacaattcaaaaattggctgaggaattcaacgactggagcctaaataactatcaagtttcagtgattatgaccggactattaagtgaagtggcggaactatcaggcacacataatttaaccttcttggttcgggcggatagatttcacgtctctaaactatttgcgtcgtcaattgccagaacttacatggatgtattagacataacagctaagcaagcagaaattttggcagatatgtcaaaaggctatgcttatgcatttcaattgatcggagatttgatgtatgaaaatttaagtcaaaagatgacgtttgaaaaagctttggaatatactaaacttagattccgtgatgtacttttcaaccaagcgtatgatgtaattgctcatgaattaacggatgtggattttcaatttttgtacgctatggcgcaagataatagtattagttcaattattaggactatgcaaaaaagtaagcagtatgttaatagctatcgtgcaaaattaattaaatatgatctaattaagccaataattaggggaaaggtcggctttaccttacctttgtttagagatttcattcaagcaaagtatgatgagcttaactggggctagaatttattgaaaaaattcggcagaaaatcacagaaatgaacgcagatccagtttggagggatactattatggactatgagactaagctagctgaagagcgtgaatacggtgaagaaaaaggaattttaagtgcaattaagaaaattatttatcgtaaccggagctatggtgtatcagattccaaaactttggaggatctgacagaagactaccatgattctgtttcccgggatcaaattgaacaaatgatgaaagaagcctaggtctaatgaaaatagccgctgctcaatgtgagtaacggctatttttttacttgttatcatcagcagcagagctggaacttacggcagatgattgatcgttgcttgaggaagccgcgctggattggttgatggatgataatttaagtaattattcttttgaaaaaatatttcttacttgttggagtaaattatcgaattctgttgattcttttatgtggccgattatttttccatgacgggcaatgaaatcatacgatagcatttgaaataataatgcatctccatttgtgtgactagcataatctagcacatagaatctaaatggatcatctgtaatatggttatgagtaattgctagtcctattactaatccagactttttagtgtaagcatgtctgctcactattaaatagcgtctacgaatatttcctttttcagaatcatgtccacccatttcgtgaccagcatgtggttcagcatcgatcattattatgtcaccttgatggacatcaatccttctcatttgctagttcctttccgacaggtttgacttctctaggattgtatcctaattcttggtattctcgctttatttcagtatcataatcataatcgtcataagcggggtctgaccataaatcataattgtttttagcaattcttttgtatacaatatcaccgtttttatttacatcaacagagaattctgtattaagtggaactttgatagtacttggaatggtaagcactattgaatttccttgttttctagccttgactaccataataagccctccttatgctaaaaatattttattatttaagtatatactgtgaatacagtgagcacaaataaaaggagccacaaattggctcctttttcgttgtgtgtcgggcatggcatttgtctagtctagtgaaagtctagatcacgggtagttgtcgccaagtgtagcgaaccacaagccgttagcggtgacgctatgggtgaaggaagtggctagcgagttttccgagcctacgtacagaaacctggtcaggccaaatggtggatgagactgcagcacaagttaaagtccaaaggacaaccgtaaaaccaagacggtaaaccagggggcagtggaaaattaaagatgaatgtcttaccccgagagatctcgtggacaggtgaaaccgagtaagctttaatatcagcgatcgtaagcctggtcgaaaaaggttaatcgcgagaagtcagctgaggtcgtagtagtgctgaaggttttgtaatgaaactggagcgaagggcctaatgtttgtaagagcatatctcgctataagcaatgttcagacagtccggataagaggatagcctagcacaaagagaacgtaactctttgatggtgaaagcaattgggacaattctgaataaatttacaagtagaaatggagatatcacgagatggaactaattgaacagattttaagtcaaaataatctcaaggaagcaatcaggagagtcaaaatcaataagggagcgcctggtgtagacaggagaacagttgatgagcttgatagctattttaaaaagcatcaagtagaaataaaggacgccatcatgaagatgaagtatcgtccgcaagctgttcgcagagtctacattcctaaagctaatggtaagaaacgtcctttaggaatacccacggttgttgaccgagtaatccagcaggctattgcccaagtattaatgaagatctatgatcctcattttagtgagcatagctatggctttagacctggacgcagtgctcatgacgctattgaacaagtcttggaatatttaaacgaaggctatcaatgggttgttgacctggatattgagaaatactttgacacggtaaatcatgataaattaatttcaataattagagagcaagtaaatgacaaaaccaccctccatttaattcgagcctttcttaaagctggagtaatggaagatggttgggttaagcctaataaactaggtgtaccacaaggcggccctctttcaccaattctatccaatatctatttagataaaatggataaagaattggaacaaagaggcctgcgctttgtccgctatgccgatgactgcaatatctttttcaaaagcggtaaatcagccaaacgtgtgatgaattcaatttcatcatggctagaaagaaagctattcctaaaggtcaacgcaaccaaaaccaaagttgtacgaccaaccaagagcaactttcttggctttaccttctggaaaagtggcgaatactggcaagcaaagccaggagatgaccgcaaaatcaagctttatgacaagatgagagaacttctctgtcgcagaaaagcagctgctcagcctctatcactagtctttactaagataaatcaagtagttagaggctgggtcaattactttagagttggcgacatgaaatattttctaattaagttcagtcaatggctgcgtcataaagtacgggtggtaatcattaaacaatggaaactaccaaaacgaatatacattaacttaatgcggattaacaaggcactaaagtgcaattttagtgatgaagatattcataaagtagctaatacgcgcttaggttggtataaaagaagtacgggtcatgtcattaactttctgcttagcccaaaagtattgggcataagcaaagcggatcgcccaggcttggtcgatccgctagaatattatttatctcgtaaataatcacaaacgtagcgccggatacggaaccgtacgtccggtgcaatgagaggggcgagttataaaactccctctactctattgcttacttgttatcatcagcagcagagctggaacttacggcagatgattgatcgttgcttgaggaagccgcgctggattggctgctggatgattgttcctgctggtgatcgcttgaagaagatgaagaacttgattgatcatctgacttcttggactgctctttatccttatcagatgaggattttgcagaatcatcctgactagaattatctttgttagaatctgcatcagaattattagatttttgctggtcaggatcagcgttctttttattggaattattataggaagtattattgtgcgtttgagtgttggcatggctaatgtaagcaccggcgccacctccacctaagatgaacatcgcagcaataacaccccaaaagactaatttcttcatattaagacaactctcccttatcttagaaaaaatattaacgaatttgagccaattggtgactttgaatcgttagttatagtgtaagacatctggccggcaggttgattacaaaatactcaattttaactaattattaagaggtagaagaaaaatatgaattacgaattaactgaacaatcaatccaatatgtatttggcaacaagaagtataagaatgggcaaaagacccgcaatttgaagaacgtgaagactggcgctaaggcagatgagttgcaaaaggtgggtcaagcaattgctagtttgcaagaagactcacttgatgaagcatacttagtgcagaagtcacgtcttgtaccagcagctgaataaattaacgaacatatttaggaaataaggagaaaaaatgatggctaaaactactaagactatgaagttaactttcttgaacggagaaaagaagaaaattagtattacgttgggggatgcagtcgataatctaactgcggatcaagtacgcggtgcgatgaatacgattgcggaagccaatgcattcgagaaagacggtgttgcatattatcacactcctcaatcagctgcatacattgaacgcactattactgatatctttaatgattcagcagaatctgcagttgagcctgcagctaagcaagactaatctggacttgcttgaccaactaattagcttggtcaaaaggctcaggagaaaatatcgcaagatgtagagttcacacttagacctttaacagaaatcgtatagtaatattactttttcaattgattttgttacatcgttgtaaaatttaagaaaaagtaaagaaacagtaaagcgggcgcatgctcgctttttcttgttgtgtctaggattacggcattttgttattttagatttgtgtgaatggtattgggatagggaataggtgaattattacaaaagcaagattatagtcaatttaacttgctattttttcaagaggttagtacaatatgaatcgtggtaagtaataggacgtgcttcaggcgtgtcgcctgtacgcatgctgatccttcaacaatgactactacctcatgagagttataaactcatggatcttgctttgaagaattttgtacattataggctccctacatgctgaacctatggcctattacattttttatatttcaaggaggaaaagaccacatgaagaaaaatttaagaattgttagcgctgctgcggctgctttattagctgttgctcctgttgctcctgtcgctgcttcagctgtttctgttaacgctgctgcaaccactaccaacacagtatacactgtaattaatgctgatggtaccgcaatcaacactccagctgatgcaaaatacgatgttgatgtaacacctaaccttactgctattgcagcttctactgtaaatggacaaactattaacggtagcattactggtaacattactgctagttacaatggccaatcatacactggtactttagatactaagaatggtaaagtttctgttattgattcaaaggatagaccagttattcattttggggagcttgctaatggtttatatactgttattgtaaagggtgtatcattcaactttggtattgctaacgcacacaatactatcactcttggctcaaagaacagcaatgttgagttctcaactgataagggtaagagctttgctaacactaaaaaggttgaacttaaccaagatggtactttagagaatcctatttcaattaaagtttcaaacgttaatgcacttgacctttcaaatgctagcggtattaacttctacaacgcttcaaacggttcacaagtaactaagggttcagttaatgtaactgctggtgttaacggtcgtttgaacgtttcaactgttgctagtgaaatcttaaagaactttgctgcttaccaagtttcaaatggtaaggctgtatcacaaatgccagaccaaaaggctgtagttgctgatgttaatgctgctttaaaggctgctaatattccagttgacaatgctggttggtttgctgctccaacttcattctcagttaatgtaaaggtaacttcatcaattaatggtgttgacgctactttacctgtaaccgttaatgttgctaacggcaaggacactactgtaccaagccaaagcaagactattatgcacaacgcttacttctacgacaagaacgctaagcgtgttggtactgacaagcttacccgttacaagtcagtaactgttgctatgaacactactactatcaacggtaaggcttactacgaagtaatcgaaaacggtaaggctactggcaagttcatcaacgcagacaacattactggtactaagcgtactttgaagcacaacgcatacgtttacaagacttcaaagaagcgtgctaacaaggttaccttgaagaagggtactgaagtaattacttacggtggtacttacacattcaagaacggcaagcaatactacaagatcggtgacaacactgaaaagacttacgtaaaggcttcaaacttttaattaagtctatgtagtagataagataaaacgaggcaatttgcctcgtttttctttttgctctagaaaaaggtaccgcttgttgcgacaccctcggaaaatattattgttataacctagctctgcttcagaaattcttctaactgtttatcagagaacacattgccatacttttgctttaattgttgcaggatttgttggctagtgcagccaacatctttcaaagaagcgactaatgtaagtgcacctgttttaaggcctttcttttcaccaacttgctcgcgttcaagcattctagtttccaagtccataatagtatccctccattctggatcggcattcattgattcaatgcgtttttgtgccttatcaaaaagcttgtcaccatgtactggctaattttaaatccaactctataaaccatttgttataataaacgttgacgtttatgccttccaatatcagatctcgcattgggaggtgaacacatgctagatttgtttcactttttattaggctctatcttagcgccacttttagtgaacgtagtttcttatgtcttagagagactatttgacaagcggctaggcaatggtcatagcaaaaggcgtaaaaattatagattgggctctaaaagacatcacaagcgtcactagcctcagccaatacatttagttttaatgctataaaatttggtgaaacaaaaaatcgttactcatttgtccgattagagtagcgatttttttgtgtcttaactctcgcacatgcaagtcgttccacttttatatatacatgttagcatatttttctatatttttctatattcagggtttgtttgcagtatttacgtttaaattaatgttttggctctaaaaaagatgccgcttatgcgacatcttggaaaatattgttgttacaacttagctctgtttcagaaattcttctaactgtttatcagagaacacattgccatatttttgctttaattgttgcagaatttgttggctagtgcagcctacatctttcaaagaagcgactaatgtaagtgcacctgttttaaggccttgctgtaggcctttcttttcgccttcttttctgcctttcttctcgccttccatacgacctttcttttcaccaacttgctcgcgttcaagcattctagtttcaaaatccataatagtgtccctccattctggatcggcattcattgattcgatgcgtttttgtgccttatcaaagagtttatcgccatgtaccggtaaatctttcatgagtttgactaaattaagtaatgtttcagtctcggttccatcaggaactccgtttgaattaattataattttagtcaagccatcctgcaatatatctgcatgattgtctacattaatagtttggtatgtagacttgattgcaactttttgcttaattttgaacgtgcaaagaaaaataatgaagacatttttcaaattattgtaagtatagccctggtggagagtatacctttgatcgtttttcgaagcataatagcgcatgcgacgggcaatatcgtcatcgtctgaccgctgcatctcaatattgtaaaggttgccgttaatatcctcaaccaaaatatcgagtcggacatctttttgatcccgatgctcaggatcgatgattacttcttgcttcttaggcggaaagatcttcttaattaggatctccggcagaattccttgcaaaacatgcttgcagaaagctggattggacatgatttcgccaaaaaccttatcttctgaaaaaccaaaccataattctttttgtttgtgcgtatttttcattgcgcacctctttctaaaaaatagtaggataaaatgtaccctctattatttattacacaaaaaatcggcaaaattttttataaaattgtttttttcagcataataatttctagctatacaatcaatgcttcatactgtataatactattcaatatttgaaacaatatagatatattcaaacatagggagtgtgatggatgtgtcagcctacaagcaacgtaacttggggattattagcttgcccactgacataaaatatcgtaattggtccaaggaccttaccaagcggagaattgagaatgactcgcaattagagcaatatatcaagtatgacaataaatatcgactcaataagaacacattggcagtctatgagttcaagcaaaatcctatcttaggcaaatataaggcagtagccttcgacctgaatcgtggaattgtgcttagtcagaagtcaacacatgccatgatgcaaggattgatgcggcatgccgtacattgcgatatgatttggcagagaatgctagctcgcgaggctggagttgatatctatcaagggattgtcatgtacaatgtgctttatttttcaatgcatgcatttagtggaaacttcttcacggactggatttgcttgcactggattaaagacttccacgtcaaacgccatgatcaagctattttcaacagtattgcacttgatgaaaacggcttggtttataattttgcttttgattctcctaagcccaatcttacgaagataattggtcagtatctgtttcataatcattattattctgacttatattatcagcatatgttgcaagaaaataatcttcgcgtaacagccattaattctgattcaatcctgcataattctaactattatgtgcaactggacttgtacgctattgatagttttaaaaagctggcagacaaattctacaatcatgttttgaacttacacctacttacgattgtgaaagaatttaagccattagattatttgcaccgtgaacaccgcttttttactaagcagattattaagatcagatataatcgttaacagctctcatgagctgtatttttttgcacttttttgactatcatctgttcttcgtcaggtactatctgacttgactttgcttatcgtagaaattaacaaacacatgcgacacttgggattagagcatctcaccactaagtttttttgcagatccaatcttgctaatctaatagtgcacaagcgcttgtgacatcatttaggagagtgtcacaatgacaagtcaaaaatatttcgaagaagcatggaaaaatcgtaagttagttggtggtgccttaaaggcggcacatgttcgaccggactatcatctctatgaagatctgttgcaagaaggtgtaattttgtatgccgagatgttgcgcaaattagatgggcaaaaggttcgcagtgagattgataagcttagcttcaaaaaggttctttggcaaacaatcgatgctctgcgccgagagcaacgcgtatgtgaacgcaatactgcaattgacgaggcttatgacttaggtaaaacagaggcatgggataatcttgtagctttaaaggatgaagttaacaaactaagtcaacttgagcaagtaattctttttgagcatttgcttgagaaaaagacaattacgcagctagttaaagaatgcggtataccgcgtattacgttgaaacgattgaaaaagcagcttttaggtaaattacgtaatgtgatggaacaataagttcattttgtaacaaaatttaatttcataaaaaattttacctactttttgcgtaataagtagtagagggtaattttgctgaagcaataattgaaatgaggtaaaatatgattaaaataaaaagtcgatatccgagaagcactgacgatttggtctttggtcacgtcatgagcaataagaagaattgaatttcagactggtacgcacgttaaagttttcaattctaagggcaataatcatgacctgaaccaaaagataattgacttcttggattacatgaatggaatcatcaatcaccctgaaggttacatcgccagcttgcaaaaggatgtcgaccattacgtgaatagcggaaagtgggtcgaagatatggacaagttggaatatgaaatgaatgaagtcgctaggaaagtaaaaatagaagatgctaagaagctagtcctagtcattaaacgaatgggtggtactaaagacactgccttacaagaactcacaaacaattacggcgatatgcttagccatgatgaaattatcaaactagtacatgaagtttatcagtaaacagtaatcaataatctacagtaaaattatctttcaaaggtgtcgcaacagcgatgccttttttagagcaaaagaaaaagttcccccaattttatgttttataaaaaaaacagtatctatgctaattatggttctcaaattgaaaaatggataatttgatgttggaacaattgatggtattcaagttaaatactgcttgattggttgttagaagagtaaaaaagccatttcagtcacatttttgctgaaatggctttttctattttccatcttttaattatattatcttgaaatgacctcttcttatcctgaagtgtagtctaccaaaaatgtcagagattatttcgttccttctcgtagagtaaattattatcctaaattctattctcgttaatcatgctatcaggcaatataattttcattcgatcatcgaacatattgaagtttacctcagagccttgaatctgataatcataatgaatcaatgcattaactaaaacctctcgaataaccttaaatggtttaaatatttttatattgcacctgtatcataatgataaaaaagttaacgaatgcaactcgttagctctagtcgtagtctaagataactattagcttaatttttaagagcaaaagaaaaacgaggcaattgcctcgttttaaattattttctctttttagtatgtttgacagttttcttatgtgcctttttgtgattcttcttatgagctactttattatgtttcttcttggtaactttcttcttgcatagtatttccagtaatattacccaaactagtatgacttaatcgaccattcttgaccgcaaaatcaaattcaagattaccttgtgcaagagtactgtgtgcattaacactagcagaaccaataatttcaccattgttattaacaatagtaactgaacgatcagttgaagttggcgtcaaacccattattgttacttgtgcatttaaagtatatttaccattgtttaaaactgcatcgtttgtttcaatttcagtaccagtattattagtcaaatggatgttattaattgaggtagaagcactaattctagtgctgtttgtgtatacacttctatcacgaagatagtgagtgacaacactacttttagttacaactgcagctgcttgaatagtatttggggcagctaccaatgaaactacaggcgatgcagcgaacaaagccgccgctacaatactagtaaatacgcgtggtgctagttaaatcgttttagttaataaaaaagtccaattagactagactcaagttgtaagtaatttaaatagaaaagagtctgatctaattgaactatctcaagcttaagcgtttttctcaccatttacaagttagttttaatcggttaaatgtgatttgtcgctcgctgtataagctttatgcgcctgatggacttaaacatcgtaaaaatgttgatcagaccaagcttcctgatagttctatcttagcgatgctcatttggcaaactgaaattggaattgaatctcaacgaagattctgtaaattcttcgttggcttatctcattctcgttttaaccgtcgagctcgaatgctcttgcctctaattcgttgtatccgtcaggcttggaatcaagaagtaaagacagctggagaatttttgattattgatagtttcccagtgccagtttgccagcctgttcgcaattatcgtgtcaagatctttcggggcgtagctgatattggttataaagcaaccaagaaagtctattattatggcttcaaggtccacgcaatagtaagcgatgatggctatctgcttgactacgcagttactaaggcgtcggtacatgatgcaaaagagacggtagaattgatgatcaatgctcatccaattaaccattatcttttaggagatgaaggctatttaggaaaagacttagcagccaagctaaagcgtatgggatacgtgctttggacaccatatcgtaaaaacatgaggggtgctaaaaagcataatgatcatcagttaatggcaattagaagaacaatcgaaagcgacttttctttgcttagctattacaatgctgagaataatcgagccaggagcttagtaggttttcaacaacggctagaaatagctattttagcttataatatggcatattgtctagaacgatttaactagcaccacgcgttagtaaatttaaaattctttttcattattatttcctccaaaaaaagacagagctttcgctctgcctttcttatttgtcagcgtataccacagacttaattaaaagtttgaagcctttacgtaagtcttttcagtgttgttaccgatcttgtagtatcgcttaccgttcttgaacttgtaagagccaccgtaggtaacaaccttgtcacccttcttaagaacaaccttattagcacgcttctttgaagtcttgtaaacgtatgcgttgtgcttcaaagtacgttcagtaccatcaatgttgtctgcgttgatgaacttgcctgaaagcttgccgtttccaactacttcgtagtaagccttgccgttgatggtagtggtcttaggtgaaacagttactgagttgtaacgagtcaacttcttgtcagtatcaacatgcttgccgtccttgttgtagtagaaggcgttgtgcataatagtcttgctttggctagcaacagtagtatctggcttagtagcagttaagtctgaactcttaacgaattcgtttgagccgtccttgttgatacgagtgtattcaacaccgttaacagttaccttaccgaatgtgtaaacagctgcgccctttgcaagagctggaatattagcagcttctgaaacaacattaccgttaatgttgtaaactttagtattatcagcctttacgtattcttgtggtgccttttcagtaggacccattacaattgcgtaaacagtaagctttgaagtaaagccagctggattagtagcagtaatagttactgggtacaaacctgcaacacttgggttaaccttgcttgagtcaatcttaatattgcttgagttgatcaattgttggtgagcagctaattctgctggagtcttgtcgaagccagtaccataggcactttgtacgtaagctttaacagcaccagttacagcatcgttgttaaatttaccatttacaataactttggtcttgtcagtgtccttaagtactaagttacctgaagttttaccatttgacataacgttgtcattgtagtaaacgttgccgtcaaatacaaatgcaggtgcattgtagtttactgatgcattaattcttacagtaattgtagttgaattaccattttctgacttagcagtcaacttaaggttgaaaccgtttgctggataatcaaagttaccgtttgaagcacgcttcaagccttgagctactaattgactttctacatctgaagcggtagtagtcatattaatagtgtcatttgattgatcactggtcttccaagcatagtgcttttgaatagcattcaaaagatctgatgaactaaagccgttagcaatttcgtttaatgaaacagtgctaccatcgtttacaacagtgttagtatccttgttgtagaagtaaggagtaccttgttggctagcgaacttagcatttaaagtaacttggtaagctctgtcattaacagtgaatgtaacaacttgttggaattcaccatttgagtttgaagcagatgctgacttaacagtaatattcttcatatcttctggcttagcatcctttaatgcatcgccacctaattgtaagatagcatccttttgagcatcgctcaatttgatactgaattgagtatttgaagcacggtcaagaacaatggtgcctcttaatgtaccaaggtcagtaacttcttgagaagtagcagctgaaacagtagaagcaggtgcaacagtgttggtagtggttgcagcagcgttaacagaaacagctgaagcagcgacaggagcaacaggagcaacagctaataaagcagcagcagcagcgctaacaattcttaaatttttcttcatgtggtcttttcctccttgaaatataaaaaatgtaataggccataggttcagcatgtagggagcctataatgtacaaaattcttcaaagcaagatccatgagtttataactctcatgaggtagtagtcattgttgaaggatcagcatgcgtacaggcgacacgcctgaagcacgtatattgtgtactcgatttttttcaagcaatgaaagggtggtttctgtcctcttatttgcttggggtcggttgggtggtttttgtccgctgcgcagatacttttatgaaaaaagagtacgatgcgatttgatgatttagagtgtcatttttggttttgttaagggatgcttgtaaaataataaggtaaagaaaatctaaagaagtaattttgtgaaaaagaaatcgacattttttgcgtacttatatattgtcaaaattaagatatgtaggtgataactatgttaaataaaaaggataaaactaaaattcaagaattaactgataaaacagtggacttgatcgtagaaaatatggggaaatcgcgtaaagaagcggaacaagattttcaaaagtcagatacatatgcgttcttatggctagcgaagcgtaatatcgaaaatgcgcaccctattattttgtacagaatgtttaattctgagttaaaagctaaaccaatagacgaagaacaacaaagttttattgactttatgactgataacacaatcgagttaattacacagaatactaatttgggaagataaaaggcaactaaagttttcaaatctacaaaggtatattggatactagttcactcaggacataatttagatgaatcttctcccgaagagctgtttgatatgtttagaaatgaacttagtataggtaatccactaccttcatctatgctgaagttaacttattaaaaaatttatataagttaaataatattattacaaatgttacttttttacgacaaatctgttgaaacgcttgtctagacctaatttgatagatacaatggaggtgttatattaaggaggataattttttatgaagaagagacttttgaccagttttgctgctgccgcaatgcttacttctgtagctgtgccagcagtaaatactacgatgatgaatcaagcctcaagccaacgagtttctgccgctaccgctgatcaaactgcatttttaaacaaggctgccaagcaggcagttaaagcagctaaaaaatatggaactttgccatcagtgatgattgcccaggcaataactgagtcaggctggggaaagtcaggattagccgtgaatgctaataacctttttgggatgaaggctgatgattcttggacaggtgagacttatactgccaagactagagaagaagataaaaacggtaagagctactatattactgctaagtttagaaaatacccatcttttgaacaatcatttgaagataatgggagtaagttgagaaatggtgtttcttgggatccgttgcgttataagggcacttggattgaaaatgcatcaacttatgcagctgcaaccaaggctttgaccggtacgtatgctacagactctaagtatgataaggcattaaatagtcatattactagttctaatttgactaagtatgatccagtaaccgttaatactactagaacttatactgctggcaaggatagttcaacttataattggccaactgctccatctgttgccagtgttattggctctgttaaagctggtgaaaaagtagtagttaccaagactattactttccatgatggttcaagcagaatgtatattgatggtcgcggttgggttaatggctcagttttggacaagagcagttccgcaactaaggaaccagtaactcaggcacctaagaatgtgccagctgtttctaagaacttgatgcataatgcctatgtttatgaccaaaatggtaagaagctaaagggcaagatgtacaagaccagtgatgaaaacggtggtaagtggatcaatacttatggtaccaagaccatcaagggtaagacctactaccgtgtcggtgaaaatgaatacattgcagctggtaatattgatggtagcctcagattcttgaagaagaatgcttatgtttacaatcaatatggcaatcgcgataacaatttgaagcacaagaagaatagccaaattgctacttacggcagtgctataactatcaatggtaagaaatactataaggtaggtattcgtcaatacgttaagaaatcgaacttcatgtaattaaggaaagggctttgttgtgaagatacgcaaatttttaattgccttaattgcgcttttggggttagtcggcgtatcatcggtcagtaaccaggtcaaagccgcttcgattaatactttagcgaagaaatatcaatatagtggtgtcacctatttatacaagatgctcaaactagaggggattaagtacaataaattccctggtgttgagtatcaaaatggcaagccagaaggaattgtcgttcatgagactgacgatcccggagctactgctcacgatgaagcaatctactttaaccgcgagtggaaaaatatcaacgcttacgtcaatgcttttgtagatagtaagcaagtcatccaaatgtattcacctaataatggtacttggggcgcaggaccgaatgccaacaatcgctttattcaaattgagctttgtgaagaagatagtcgtgatgcctttgctaagtcagttaataatgatgcaatttatattgccaagttgcttcatcgttacaatttaaagccagacaatgcttgcgatgatggtgaaggcacaatttggtcacacaaggcggttagcaccttcttaggtggaacagaccacgttgaccctgatagttattttgccaagtgggattacgacatggatcagttttattctttgatcgagtattactatgacttgcaaaagaagaatgaaaatactgatactaaggatccaaataagattaaggacgaagtaccagcagaagttcaaggtgcggtaactttaggtcacgatgcttatgtttatgacaagaacggcaagaagaccaagatcttgaagttagctggtagtccggtaaccgttttaggctacaagataatcagtaataagaagtactatcaaattggaaagaacgaatacgtagtagctactaatattgatgctactgctagaactgttaagaagaatacatatttgcggactcgttcaggtcgaattgaaaaaggtaatttggtcaagaagggtagtcgggtcatgacatatggcagcaagattacaattaaaggtcaaaagtattatgctttaaatgctacacaatatgttttagctagcgatattaattagaaaaatacgtcttaaaccataaataatgggaattaagacgtattttttgtataattcttgtgttgaatgtgaaaaggggagaatttaatggcgcaattatcattatttttggtcgtcttattagcgctcgtaattccaatatttatggcgcgtttcaaaataagcactgtaccaacggcgattgctgaaattatcgtcggaattattgtaggttcgagcggatttaatatcgtggtttcgatacatgatttaacatttttatcgaacctcggcgtaattttgctgatgtttttatcaggaatggaaattaattttgacctgctacagcgcaagaataatcctaaggctaaatcacaggcgggaaaaactgtcgatccgttgccaacagctttaacagctttcgctggaattgtggtaatggcctttgttttggcatatgttttaaagctgatagggctatttagcaatgttatcttggcagcgattatttttatgaccattgcattgggtgtagttattgctaccttgaaggaaaaggatattcttggccgaccgattggtcagacaattttgttaactgcggttttgggcgaagtaataccgttgctcttattaacgatttatgcctcagttaatggagggaatgctggccagctttggttgattatcttactgtttatcgctgcgattattcttttgcggcggtttaagcaaccgtatttatggtttagcaaagtaactaaggcaacgactcaattggatattcggttagccttcttcttgatttttgctttagttactgtagctgagcgagttggtgctgaaaatattttgggagcattcttggccgggatggtaatgaaattattggaaccaagcgaggcaactaaagataagctaacttcaatcggttatgggttctttatcccaatcttttttattatgactggcgtgggcttgaatttaaagtcactatttgctcatccatcatcattgatgttgttgccagttttggtcattttcttgttcttagctaaagctcctgtagtttttctttatatgcgctattttgaaaagaaaaatgcctttgctggtggctttttaactgctactacaattacgattgttttgccaactctacaagttgctagaaaattgcatgcaattacttcaacacaatcagatgcctttatcttagctgcggttattgtttgtatcgtgagtccgattgtctttaattcaaactttgttttatcacctgaggatcggatgaaagaaactgttactattgtgggtgccaatacttttacggtaccagttgcacatgatttgcatgataattggtatacgatcaagatgtttaccgatcagcaggaccaatacgaaacttatgatagtagggttaaaggtttaacattacttgataatttggataatcaaagcttagagcgtagtggtgcctttgattgcgacattttcgtagctgcagggcatcatgatcaagaaaatgcacgaatggcggaatatgccaaagacttgggagtcaaacgagcaattgcccgaatgaatgaagtcgatagcaatacgatggctcgatgccaggaggcaggagtagagttgttcaactttactaatgtacgttctgctctgatgcgagctttgattgagtctccaacggtctacaagattatgactgatactaacaatgtgttgtactcagttaaggtgagaagtacttcctatactggacgaccacttagggatctggaatttgtggacaagattacggttagtcgaattcggcgtggtgatgagtggttaataccacacggttggactgttattgagccgaatgatatcttgatcttttctggagaatttaaggttgctgatcgagtaaagaagttacttagtcatcaaaattagagataaaaagaggctaaatgcaaaaatcctgcatttaacctcttttttacgtaattaatgattttgtccttcaactgcttcaatgtcgccttgtccatcgcgctcaacaatagccccaattgcagcgattaagcctttaacaatatcggctaatgccattgatggagtgcttggtcttttgacaacttgttctggcaaaaatgggatgtgaatgaagccagctttaaggctagggaattctttagctcgcatgtattgcacttgataaaagatgtggttgcagacgtaagtaccggcagtgttggaaactgtagcaggtagaccaacagcgcgaatcgccttagccattgccttgattggtagttgggtgaagtaagccgtgtcgccatcggcttggataggttcaccgagcggttgataaccatcgttgtcggggatgcgaccatcgttaatattaatagctactcgttctggggttaaagcagcacgcccaccagcttgaccaacattaagtacataatctggtttttcttgcacgatggcatcatgaacaacttgggcagatttattgaaaaccgtaggaatttctaatttgataatttttgcacccttgattgagtcaggtagttttttgactgcttcaatggcggggttgatcttgtcgccaccaaaaggatcaaaaccagttactaaaattttcaatggcttttcctccaaatttaaatcatagaattttttgctttagtcaaaatttgcattgtctctaaagtattgacaaatgcttcatccgctttttgcgtatcgtgttgatcaatcatctgggcaaaagtattaaattcagctgccattcggtgcggatatttatttaaattataacgcttaggttgctcatttctcatttcaactgtgaaattatcaagtgttcccgttgagccgtcaaaatagatactacctttttcaccttcgataaaagaacgtggcgttacatagctatcttttgatgccgtgagggaggcttgtttgtcaggataagagaggtgaagaataccagaagtatcaacgcctttttgcatgttggcataatattgcacttgatcaggcaagccaaacaatgccgagacaagatgaatgttgtagatatttaaatccattaaagcaccgccatcttttttaggatcaaaaaccggcgcaattttgccttcaagaaaggcgtcatagcggctagaatattgcgtataatttaggttaacaatatgaattggtgcgatcttgttcaattctttttggatttgtttgaagttttctaaataaaggttagtaattgcttcaacgatgatcaaacccttttcgtcggctaacttttttaattcttttgcttgagtggtgctctgaacaaatggcttttcacagattacatttttatcgtgttctagagcagctttagcaatctcataatgcaagaagtttggcaccgctacataaactgtatcgacttcagaatcagccattaattcttcattgtccgtataagtacgtttgatgttgtactttttagctaattcccgggcaatattttcactgcgcttagttgaggaaatagccgttacagtcatattcgcaacttgatcagcggttgttaaaaagtcatggacgatcatgccgctgccaataattcctaatttcatttttttgcctacttctttttagtattagtggttggtaaatctttagcgttagttgcagagtctggtactcttaagaagtcatggctgccgaagttgccataactttgaccaactttaacgtacattaatttacctagtttcatattaacaaagacattaaaggtagataatttattacctttaattacagccttaacattcattgattggtacttgcctaattttttaatttggctgaaaattttagcttgatttgtactttgagcagtagtgtcaaaaattggtgctgctgcctttttcatcaaagcttggtcagtacttttagcagttaaagtataagtgtaaacaccatcttttttgctttttttcattttataagcagaaaccaacttatcacttggattggtgatcatgtggttattcatgatggcatcggttaagtcggcataattatgaccggttagtttttcaaggtcagccttgtaccaagtatcttgtccattaatgtagacattgttaaggttgacccattcctcagtagaactagttttacctttgctagtggtttgattggtgatgtggtaaacagtggttttaccaccaaaggtagtgttagctaaggcaacttgattagaagtgtcggtacccagagtaacagattgaataacctgtcccgacttgaagctacttttagctttttgtacaacttgagtcttagtcagagctgaagtagccttcttctcttgtttactgcagccacctaataaaaagaggacagcaaaggataaaccgataatcgttttcttaagtttcatttttttctcctctatgcttcaataagtctattataactaaaaagtccgttgctcgttggagttacggactattcttttactttattttgtattaattttgcctaaatctacggccgatttcttgatagaagcaggtaccgtcaactttttgacttgattaatttgatcaatctgcatggtgaaattctttttgtgtccttcatccttataagtagaagtcacattaacatttttgatgtcgtaattctgatctacgttaattttgatttcgttgctaattggtttaacatcatcaagatcgatgccgattaaagcagtaaaggcagaatcagatacaattgcgttccaaatttttttgttatttcctttataagtaagcagataatcattgccgttttgctttaccttaaaatattttgcgttagggatgaaaggcatgagtaatgtgccgttcaaattgtcggtaatggcaccataggcactagccttagacaactttgtcttaaaccaacgctgagaattggtacctttcatttggatatagttgcttttaccctcaatccacattttatagtgattagagctgctagaaacattagcataaataatcgttggctttttagtatattgggcttcggctttttgcaaagacttgccattgcttaattcattccaagtagcgtgcattgaactgaatttcgttttttctgcactggttaaaatcgtcttggcagtaggtaaattagctgtcttttttgaacctgtcttagagcaggccgttaaaaagagtaatgctaataaaacggtaatgataatattttgatgtttaaatttcatacataactttctttcattaaattttttcttctagtatagcaagaataacgttacaaaattgaaaaaacacgatttttttagtcttaactctatgaaaaaatttgtgaaatgtgtaaaatatggatgaaacattgaattttaaaaggagatatttcatgtcaaaattagttttaatccgtcacggtcaaagtgaatggaacctttcaaaccaatttactggttgggttgacgttaacctttcagaaaaaggtgttgaagaagctaagaaggctggccgtttaatcaaggaacacggtcttgaatttgaccaagcttacacttcattattaactcgtgctatcaagactttgcactttgcacttgaagaaagtggccaactttggattccagaaactaagacctggagacttaacgaacgtcactacggtgctttacaaggtttgaacaagaaggctactgctgaaaagtacggcgatgaacaagttcacatttggcgtcgttcatacgatgttttgccaccagctattgatgatgacaacgaattcagtcaagcacatgaccgtcgttacgcaaacttggacccacacatcgttcctaaggctgaaaacttacacgtatgtcttgatcgtgtaatgccattctgggaagaccacattgctccagatttacttgacggcaagaacgtaattatcgcagctcacggtaactcacttcgtgctttgactaagtacatcgaaaacatttctgatgaagacattatgaacttggaaatgaagaccggtgaaccagttgtttacacattcgacgaaaacttggatgttgttaacaaggaaaagttggacgactaatttattaagtagttattcacacaaatagaacttcggcgtaagtcggagtttttttatacaccaaaaaaggcatcaccgttaagggatgccttctttgtatcaacttgctccaaaaactataattatttctttgatttcataatttttttggaacaacttcattatattataaataaagaaagatcgccatttttttctaagaaagtggtgaaaattgacagttgtatatgataagtgctattttgagttacaggagtgtagaaattgggagaaaaatatgcaaacaatcgataattctctctttcaagtctctgtcgatgagaatggggcccggatggcacatctggtgtctttaacagatcaatttgattatctcggcgagcaagaaagtgaagaaggtatggcacttgcttttccagtaatggatcaagccgataatttggctaacaagttgccttggaccgttgttgacaaaggtgatactcgcgtaagtctaactttaattgatacgccggagagctataagagttttccatatcattttgaagtaatgactacttatgctttggagggtaatcaagtcaatatatccttttatttaaaaaattcttcaaataaggaactgccattttctttgggctttatcttaccaacttcttggcaaagtgaaagccaggtcaataagattagtttgactggcaaagaacatggcattgatcttacttcaactgattttaagttgagtgcaaaagaaggaagcgttacagcttttacggataaaattgaattagaggcaaaaagtagccgtaattttgcgttaagcttgactttgaagtaaaaattagtaacgattttaataagatatactaagcaagtcagcgatgatttgctttttttgttataatacattcaatgtgaatttacatcataataggtatattttatgaaagatagaaaacaaagatctaatcacccgcataatagtcgggtagacacacacagttataaaaatcgtcatatttgggtctgggttattagtatcgtagccttgcttgcggttgctggagcggcgtactttgcatcagtttatttccgtactaagtcagcggttgataagacctatgatcctaagactgcagtgaaaactacaggtgaatttgatggaaagaagaagttcgctgttttactgatggggactgatacaggtgcccttgatcgaactgaaaagcgcggccggactgataccatgattttagctgtagttaaccctgctaagaagcgttacacattggtctcaacaccgcgtgatacgatggcacagatggttggaagcgagagcttcaagacagaaaagattaacgccgcttatgaattaggcggggctaagatgtcaatggattcagtttctaagttaatcaatgtgccaatcaagtattatgccgtggttaacatgggtggaatcatgaagatgattcgctatgttggcggaattaatattagaccaacgcttagctttgaatatggcggttatatttttaaaaagggcaagctgacccatatgggtggtgcaggtgcgctagcatattctagaatgcgttatgatgatccgcgtggagattatggtcgtcaagaacgacaacggcaggtaattaccaccttgatcaagaaggcagtttcaattagttcattatcaaatctggattcaattttgacttctgtgtcaagcaatgttcggactaacttgccatttagtgcgatgcagcagattgcgatgaattatcgtagttgtgccaattcgtcatctagtgattatctacatggttacaatgcaatgatcgacgatgcggcttatcaagtacagccaactagtgaattgcaacggatttctaacctggtgcgcaaagaattagggttacctaaggaaacggtttcaaataatgaaactttccaaaacgaaaagaatattgcaaatggctttagctttaagagcgaaaaaacgcagcactatcatatctatgattacaccgaagaaggtgataattaatggcgcgcatttgggctactctgattggctacgtttttggaaatttcttaacggcgatgatcgttggcaaaatctttttaaaaataaatcctactgaatacggttcacataatccaggaacggctaacatgggtgctgtttttggtaaaaaatggggtattttaacctgtttaggcgatttgcttaaaagtttaattgccttgtttattgtatattttgcttttccagctcatattaatattgcttatacagggctaggcctgatcttaggacattgttttccaatctgggatcattttcgaggtggcaaaggagttgcggttgcagctcaggtagcagttttttataattggaaagctggctttgctactttattagtggctttggtattaacagcaattatgcaaaatttgacgattccgcctttagtgtttatgcttttattcagtataaatacattcttgcataatcaagaagcaggatttgtttttatcgtgattactttgatcatgtgctttaagttctggcatgatatcgtagactttttcaccggtcatggcaaaaaggttgatattctgctttcaattaaaaagaagctagggatcattaagtaatgacagaaatttttagtgaggacacagactagagaaaatgagtgagattaacaagaaaaaatcactaaatgctcttcaaatcatttgtttgattgtcgcagcattctttatgctagtgcagatgtattcttggggtagcacttttggtagattaccattaagtaccctaatgagatttattccaggactacttggtcacagtacgatggtactagtaccaatggtctttggtgctgtttatagcaaaagaaaggttcatccaactgaagcctttaagttttggattatagcggttgttacactagtgcttttatacttggtgaacttctttaaacgaccaggtacctttaatatgtggaagctctggggagtatttttcccagttttgactagtacatcagtattgttggctggcttgatttttagtatgctagttcaaccatacttgtatgaattacaacatcgcattactactaagcaaaatgtattattgcttagcgcattaactttgactggttttgcgactagtgcaggtacaatgatctttaacaagtcaatttatggcatttatttgatcttgtactttgcttgggggatgtttttagctaacgttaaaattcctaaaaaggtctttggctggtcaattgcagctggagtaatgtctttcttcgtaatgtttatcggtattcccggatttaatggggtttactggtaccaacgattatctggtcgaagtggcgtttattcctggaatcctaaatttttaagtaatattgcttcaccatttttgttcttaatggttttagcagccttcttaatctttagaaaagtgattgttagctatagtgctaagcagatgcacttctttattccagtaattatttttatggacgctccaattattggtggttttgttaaatcgttccgctttaccaatagcgctggatttaacaagttcttgatgattgtcatcatgatgctagctgcctggggcttaagctggctatatgagcgctatttattcaaggtgaagccggttaaacggacggttgcttttttcaagcaacataataacttagcagaaattgttgaagatgcttggactaacttcactgcttggatagttgaaaatcgagtacgactacttacatggggctggttctatgtattaagttttgcttcattcttaattgaatcagataatctgcggatccaaattacgactgcaactgatatcaatgccgtaattttcttgctcgggactagattcttcgctattattttgacagcaatcttccttgatgcaatgtttgcaattttctacttcattactacgcgttactggacttcaacagttttagtaactgtaattacaattggttgggctattgccaacaagattaaattagatcttcgtggggaaccaatttatccaactgaattagacgaaattgttaactggaagaccttgatgccaatggtcggccaacaaaagataattatgatcgctattgccttagtaattatcattgcattgactgtctttcttgcaattaagtttccaattaagaaaaagggctcatggaaacgccgtggtatttgggcattgttgagtttgcttttgttcatgacaccagtgcgctttaaccacgatggcggaattatttatcacattaaccgtggctttgataataagcaatcgtttagaaaccctgaacgtgatattcaaattaacggtccattattgaacttcttgaattactttgacctgcagattatgaataagccaactaactattcaaaatctacaattcaacatttgaatgagaagtacagcaagatcgctaatgaaattaacaaaacaagaaagaatactctaaagaatcaaactattgtttacaacttgagtgaaagttttgttgatccatatactttcccaactgtaaagatcgatcctaaggtgccaaatccagttaaatttattcaatcaatggctaagagatctacttacggtagcatgcttagtgcaggttatggtggtggtactgccaacatggaatgggaaactttgaccggtttcaacatgggaatgttcaagtcaaccttgacgccatatgttcaaattgtgccaaaccatgatttctatccaacggtcggaatggacttcaattataagtctgcagttcacccattcattggtacttactactcaagagtagaagactataagagatttaagtttaataagtttgtttaccttggctctaaatataagatcattgatcaaaagaaacttggtaaatcaacttataattctgattacactacttatgcaaatggtttgaaacaaatcaatagcatgaagggtggtcaattcattaatttgatttcaattcagaaccacatgccttacaacaattggtatccaaacaatgaatacatgggcaaggtatctggtgaactcttcaacactgctgctattcgtgaacaaatggcaacttacatgaagggtgttcaatacactgataaggctgtaaagcaatttatcggtaagattgataagatcaagaagccaatcacagttgtcttctatggggaccactacccaagtatcttgtcacaaaactacgctagtcgttatccagtgcaaatgcactcaactcgctacttcatttattctaacaagtatgctagagaacatggtgctaagagcaagttgactcacaactctaattacgtcaacactagtgactttactgcaatgatgcttgaacaaactaattctaaggtaactccttaccaagcattgttaacagaagttcacaagaagttgccagcaatcacgattaacttcaatggtgatcaaggcttccaattagttgaccaaaaggggcacttcgttgatccaaagaaattgacttcagaacaacaagcaattttgaaggattacgaaatggtgcaatatgatatgactgctggtcaagcttatggcttaaaagctaagggcttttacaagatcggtgactaaataaaagagatcgaacgtaaagttcggtctttttctacgtaaagtcaagcataataagaagtttggcttcattttttgtttaaatttcaacttaaacatcttttagtgtcgatttatttttttagttagacacgacaaataagcccagatccatatctgatttttgggcttagcgttataatgtacttgatcaattaattacgactaaagtctttttgattatgtgtggctacgttgtaatcatatggttgatcattgataatcagggcataaatggttctgattagtttatgaattgaagcaatagctatctttttgaaccctttggtttgagaggatagctttttgctttcataataatctgctatatgacacggatttgtcttagctgcattatcaatttgtccaatagctcgataaagcaacttacgtgcgactgcattgccatgtttagtaatacttaaattagagtccatttctcctgactgatatctgcctggatcaattccgataaaagcattgattttattaggattactaaatctgcgtaaatctcctaactctgctaaaactctgacagcagtggtctgtgcaaagcctggaatgctttctaggttttctaaatcatgattaggcaaagacttcgctaacttaaccattcttgcgattaaattttctctttgatcacttaaattaagcaatctgtgtgcataatactgcacttgctcgacttctatgctagagcaagatacaactggataagcttgataagctaattcaattaatttatctgcagtccttagagcgtgtttaaaagcaatcccctttaagctcattaaccagttaataagctgttttttatcttctcttcttactaagtcacaatgaggatatcgcacaactatttgccagtaatttttacctttagcagaagaaaataaattttcaatttcaggaaaagtcgattgtagagcttggtgaagtcgatttttagctattaccaagtcacttgtcagctggtcatagaagcggctcaaagcattaagctgcttataagtttgggattcgctttgattaaccggatggcgataaagtctttgaattaaagctaaatgataagcatcagttttatcggtcttgttgtagcgtagccccatattcatctcttttttggctttaagcggattaataacaacatattcatagccgtagtcttcaagaaaagcctgcagtctgcgtgaataaacaccggtagcttcaaaaataatttgcggatgtttagaaaaagcggttaattcatgaagcaattgaataaaaccaggacgattattagtaatggttagttcatttttgctttcaccaattagttcacaaacagtagaagtagacttgcttacatcaattccaaaagtaacttgcataataaaaacctccaaaacttagtagtaaaacgtatttacttaagaaatcagatctaattttctaaactcgacatctagtgtccacattcttcgaagagactattgaaaacttaagtaaaactgccagtttattatgcgacatcaagtgtctaaagacctcagggcatatcgttttaccactactttaattctacaaaagaataaaaatagtgaatcaattatcccgtcggataactaattcactatttagcttagaatgttttgtatccaatgataaaataagggctaagaggaataactgataattagctgatttaaaggtgattagaatgaaaaagataataacaatggcactagccagtgctgcactatttggatcttctgcaacaactgttcaagctgggacatataatcctaagaacattaccagttttaatattaataggcgtaactatgtagctaagggaaagatttataaactccatttacccgcagctggtagattagttactaatggcaatgttactttaaaaaatagtatggaatggacctgtattccttatggtaaggacaaaaatacgtattatctgcgtaaaggcacatattatttaactagttcaaagaatattagtgtgaagactacttatactcgtttaactaagatccgtaagaatttagaaacttacgttgaaacaaagaagaataatgacaacagtagtcttaaagctagaaagattgaaattggtcaagatattaaagcaatgggtgaaatgtacgattacgatagtgtcgactactacacatttactattgactcacctcaaatggttacgatgaggatgatcaataatccgatttatcagcttggaaaaggtaacattttcagcaagatgaatgtaatcatgttcagtgaaaataatccagttggcggtagtacgatgctttacccagagagtttcgaaattaatggcaataagattgctagtcaaagctggtacttgtctaaaggaaattatacttttagtgtaaatactcgtggactttataattttcaattaacggctgttcctgatacgcgtgtggtaccggcagatactgagatagaatctttacaaaacactaaggatggtatggttgctaacttaagggatgcacgtcatgcgaagacttatgaacttgcatggcgtgaaaaaggctcaaaggcagctccattcacttctagtagcaatactacagaagtaagtactgcacctgctacacgttacatagacaaaaatgatcgtaaaatcccagtttcaattggtaaaaaattagttaatggtcaaagctactattttgtagctcgcggtgtaagcaatcctgattacattcgttacggcaatccggaaaaagataattattttggtgcttggagtaattcagtagaacacacttactatgcaccttcagatgcaacaccaggtgcagttgatttaaccactgctaaagctgacagtacttatcacaacattcatgtggcttggaataaaattgctagtgcacaaagttatcgcattgcctaccgccaaaaaggtacaaataagtggtactatgaagtaactgatcaggctactaacgcgattactggtattactagaaatagaaattatgaagtgaaattgcaagcattgaatggtgaaaaaactggtccatggtccgcaattaaaacaatttttgtaaaatagcggttgactaaaactatttttctcgttaatatcataactaacaaatgagtagcgagtcggctcagcgttcagagaactagcggttggtgtgagctagacaggccgattttagcgaagtacttaatagggttgctcctttaccggcttgaataaggcgcagcagcgcaaacgtgggtggtaccacggctaataatgtaatttagtcgtcccttggtcttttgaccaggggacgttttttattggaggaaaaactatggcaaaatttgatattttggaagatttaaaatggcgtggtgccattaatcaagaaactgatgaggaaggtttgagaaagtacttagcagaacatgacgattgggcattgtactgtggtactgacccaactggtgattcccttcatattggacaccttattccattcatgatcttgaagagattccaaatggcgggctaccatccagtaattttaattggtggtgttactggtgcgattggtgacccatcaggccgtaagactgaacgtactttacaaactgcggaacaagttaagcacaatgaagaaagcttaactaatcaaatgaagaagttatttggtactgaaaattttgaaattagaaacaatgctgaatggctaagcaagcttaacttgatcgacttcttgcgtgattatggcaagttattccaagttaacaatatgattaacaaggatgttgtagctagccgtcttgaaaatggtatttcatttactgaatttacttatcaaattttgcaagcaattgatttctaccacttgaataaagatgatggtgttcaacttcaaattggtggtagtgatcaatggggtaacattactgctggtattgatttaatccataagcttgaaggcgcagatcgtccagcctttggtttaactattccattgatgcttaaggctgatggtactaagtttggtaaatctgctggtggtgctgtttggcttgatccagaaaagactagtccttatgaattttaccaattctggattaatcaagatgaccgtgatgtggttaaatacttgaagtacttcactttccttagccgtgaagaaatcgaagatttagctgaaaagactgagaaagaaccttggaaacgtgctgcacaaaagaagctggctgaagaagttaccaagtttgttcatggcgaagcaggtcttgaagaagctaaaatgattactgatgccttgttctcgggcaatatcaagaacttatcagttgctcaaattgaacaaggcttgaagaatgctccaagtgcggaagctggcaatgaaaagaagaatattgttgatttcttagttgacactaagattgaaccttctaaacgtcaagctcgtgaagatgtaaagaatggtgccatttatgttaatggcgatcgtgagcaaagtactgatttcgaagttgatccatcaagtgactttgatggtaagtacgttattattcgtaaaggaaagagaaagtatactttagttacaattaaataattaaatatatgattttaacattttatatataaaaatagagggattttttcctctatttttttagctaataatcggagatatttactaccaactaatatttgtaaaagataaagataatgatttgtgtaaaataatattttacttcttaaattgttattttattttctaaaatcaattgctacaatctatttattaagttattcacaaattcacattattactatacaatttgttatttcaagtgtaataccaatataaaatagctgcgtataccttttgcagatgctgatgcaaagcactctattaaaaactgactcttaataaaaatatgtgaaaagcagcactatctgctttacttctaatcaaacagtgttatagtaatagtgtaaagagaaagtaagtaaatagaaagaggttattaaaatgttagaatctaagaaagctattaagattatttcaagtttggtaatcggtttgagtttaggctgtgttcttactcctattgctcaagctacttcatttactgctcctaaattgggtactgcaacacaagctccaaccaatcctgctattaaaaagggtgataagatctttgttgttattaaagacaccaaaaatcaaaaagtagctgtttacaataaaaatgctgaaaaaactagcaaaaaagttgcaatgggttctacttataccgcaaaagacgttaagaaggttaataaaaagaagattgttagaatcaacaagagtcaatggttgaatactaaagacgtcgttaagaactaaataaaagcaaatttaataaccgttttgaatacttattttctaaaaatacttggagagaataaataaggacgaggatgttcaaatgaatgtcttcgccttttttggtataatgaagacgccgctttagctcaataggtagagcaccgccgtggtaaggaggaggtccccagttcaaacctgggaagcggcttagttgttgtttttggcaagaaaggaaaaattttatgaagcatgaacttacaatgaatgaaattgctaaatttcaaaaagaatatgagcaaaaaccacaaaatcgggttgcggaattggctgttgttaataatggtgtggctaaggctagtttggattcagaaaaggttaggaaattgaaccgcactttttcaattgaaatcccaactgataatgttactgatcaaaagcaatcgggtcgctgctggctatttgcggccttgaatacattgcgtcatggttttgctaagaagtataatgctaaaaactttactttttcacaaaattatttattcttctgggatcgaattgaacgagcaaatattttctttgataatattttgaataccgcagatcgtccacttagtgacagaacagtgcatacttatatgcagggacctgatactgatggtggccaatgggctatggctgtttctttgattaggaagtacggcttagtgccaacctatgctcaagatgaaagtttcactgccaacaatactgctttcttcaatcgtattttgaataataagttgcgagaagatggacttgtgttgcgtaagttagctcaagcaggtaaaaatgatgaaattgaagctaaacgtcaagaatttttgagtgaggtttaccgtatggcagtaattgctttcggtcaaccagtacaaaaatttgaccttgagtttaaggatgatgaaggtaagtatcattttgatggtgatcttcctccacttgatttctttcacgactactttactgatgacttggatgactatattgttttgttcaatgcaccagatcatgaatttgataagctgtatgctttgccatttgaagacaatgtagagggcggaagtccagttcatttcttaaacactaaaattgaaaatcttaaagaagctgcgattaagcaacttgaagcaggcgaaactttttggtttggttgtgatgtaggtaaagatagcgatcgtcaaaagggaattttagctcataacctctatcaaactgatgctatttttaatattgaaactaagttaagcaaaaaagagagactggaaactggtgcttcgggttcaactcatgccatgacgatggttggtgtggatgttgttaatggaaagccacgtcaatggaaaattgaaaactcatggggaaacaaggtcggtgaaaaaggctactttgtgatggatgataactggtttgatgaatatctcttcaaagtagttgttaaaaaacaatatgtaccggaaaaactggttaagatttgggaaggcaaagcaacgccggtaaaagcatgggactcaatggcataatggaaattaaacaagttatcgattttactcaaacacacttaaagaatgaaaaaacgggtcatgatttttatcatggcgaacgtgtagctaatttggctagtcaaatgtatttagcagatcatgctgatgctcatgaagatagccgggtagttgctattattaaaacagcgggttatttgcatgacacgattgatgaaaaaatatgtgctgacccacaaaaggtaattgatgaaattaaagttttattgccgcaagtagggtttaatgaactggaggcatgggatattttattcaccattcaacacatgtcattttcagctaatattgagcatcactatcatttgcctttatctggacaatatgtgcaagatgctgatcgtctagaaagtttgggtgcgattggaattgcccgtgcctttacgtatggtggtaaacatggcaataagatttacgatccagagattaagccagccgttttaactagtcatgatcaatatcgtaaccatgtcgaaaccacaatcaaccacttttatgagaaactttttcatttagaagatttaatgaatactcctgctgccaaaaaagaagcggaaagacgaactgcatacatgcgcgactttgtacgtgaatttatgcaagaatggaatgtttagaataatttaattttgaataagccttgatacatcagcattgaggcttattttttaaataaattaaaaataatattaaaaaaaacttgcaaagcaaaaaatatttagctatacttataaacaacttaaagagttctattaattttctcataaacgaggggagcaataatatgaagtttaccaagttattcgctgcaggagcaaccgttttgattgctggctcaacattagcagcatgtggtagtaattctaattcgtcaagttcatcagctaagaaaacaattaattggatggattcggctgaaattccaacgatggacatttctaaggcaacagacgttaccagttttaaccaattgggtaacgttgaagaaggtttataccgtttaggtaagaattctaaagttgagaatgctttggcaacagataccaaggtgtcaaaagatggtaagacctggactttcaccttgcgtgattctaagtggtctaatggtgataagttaacggctaaagactttgtttactcatggcgcagaaccgttaatccaaagacggcttcacaatatgcttacctcttcgaaggaattcataatgccactcagatttctgcaggtaaggcaccagttaatagtttgggagtaaaggctgaaggtgataataagttagttgttaccttagacaaacgaattccatactttaaattattgatgggattcccattgttcttcccacaaaaccaaaaggtggttgaagctaatggctctaagtatggtacttcatctaagactacagccttcaacggaccttttgtacaaaagggctggactggttctaacctttcttggaagcttgtgaaaaacaagaattactgggataagaagaatgttaagcttgatgctattaattacagcgtgcaaaagacaccatcaacagcttacaacttgtaccaatcaaataagcttgatgctactattttagattcacaacaaactaagaacttaaaacatcaaaagggttacactttgcgtgatactgcagcaaccttctatttgcaatttaaccaaaagaagaagattttccaaaatgctgacttgcgtagagcaatctcaatgtcaatcaatagaaaggcactgggaagtgctttaggtggtgctaataccccagcaaccagtttaacttcaaagggtgtagttaaccatgatggtaaggactggtcagaagttgttggtgataagaagaacgccgcatataacccaactgaagctaagaaactttacaagaaggctttgaaggaattaggcgttaagaacgtttcatttacaatcctgtctgatgatactgattcaggtcaaaagacgactgaaacacttcaaagtcaattagaagaaaacttgaagggtatgaaggtttcagtagctaacgtaccattcaagactcgtttgaaccgttcaactagtggtaacttcgatgttgttgtttcaggttggtcagctgactttgccgatccaatttcattcgttgacttgtttactagcaagaatgcacaaaataacggtaagtggagtaactcccaatacgacaagttgatcgctgattctaagactacagcagatacaactaagcgttgggatgaccttgaaaaagcagaaaagatcttgcttagcgatgaaggaatcgccccactttactacaagactgaagcttggttagttcgtccagacattaagggcattgtctacaatggcgctggcttaaactacaacttcaagaatacttatgtagcaaattaattaaaaaatcaggaggacatagtaatgattattatttcagcaattattattttacaaacaagacataaaaataatctctcttcacttgtaattgcgtaataatagtctagctatgatttgatgaatagatagaaggagcaaccatgtgaaggttgctcctttttgtaataaaaaagaatgagggtcaaaatgaaaaagtggaaaaagtattttagtgcaagtttattaaccgtcgtatcagctgcaactttggcagcctgttcaaataaaagttcgtcatctggtaccaagcaaaccttgaattggatgactaaatcagaattacaaactttagatttgtccaaggtgactgatgcaactagtttagatcaaattaataattcgatggaaggactctatcgtttaggtaaaaattccaaggtggaaaatgctttggcaactaagactgaggtatcaaaggatggtaaagtgtggcattttactttgagaaagaatgccaaatggtctaatggtgatccagttactgctaaagatttcgtctattcatggcgtaggactgttgatccaaagactgcctcacaatatgcttatcttttctcaggagtaaagaatgcggatgatgtagtagcaggaaagaagaaggttgaaacactcggtgttaaagcagatgataaccaacatttaaccgttactttggatagaagaattccatactttaagctattgatgggcttcggggttttcttccctcaaaatgaacatgccgttgaaaagtatggcaaaaattatggtacctcatctaaaacaatggtttataacggaccatttgtatcaaaaggctggaccggttcaaacttgtcttggaagctagttaaaaataaagattactgggacaaaggcaaggtaaaactaagtaagattaattacagcgtgcaaaagacaccatcaactgactataacttgtatcaatctggaaaattagatgtagcattattggcaccacaagctacaaaacaattgaagaaccagagtggttatacaattagaccagcttcttcaacacaatatttacaattaaacgaaaagaacaagcttttccaaaatactgacttccgccgtgcactttcattatcggttaatcgtaaggcattagcttcagctgtaggtggtgctaacaagccagtcactaccttttcaccaaatagtatgactgaagtaaatggcaaagattatactgaattagtcaaaactgctgaaactgataagttaatgacatataaccctactttagctaaaagttattggaagaaagcacaaaaggctttaggacagagcaaagttaacttcactttgctaacctatgacgatgatgatgccaaaaaagcaggtgaatacttgcaaagtactattgagtcaaacttgaaaggcgttaatgtcagagtaaatagtttacctaaaaagactgccttagttcgtggtcaaaatggtaactttgatgctttactgatgggttggcaagctgactttactgatccaatctcattccttgacttgaacacctcaaatgcttcatacaactggggcaagtgggctaataaggaatatgataagtatgtagcagcttctaaaactactggaaacgaaaatactcgttttgaagacttagctaaggctgaacgtgtattgttaactgagcaaggtgtagtaccactttaccagccagcagaagcttggatggttcgtccaactgtcaagggcgttgtatataatggtgctggagctaactataacttcaaatatgcttatgttgaaaagtagactaaaatcctaaatatctaaataatagaacttataacaataaacaactcctctatgtaattaaaaagcagaccgaaaaaatccaatgtcattaagttaagacattgacaattaatattagacttttaaagcactgatttaacatttaattggttaaattggtgcttttttcgtacaacaaataaggcatagcacagattctgcttttttaagctacgcgatataaataatatacagctgatttgggcttaatatttctcttgtccttgcggcctggtctaattggaatggtataatagctgatctgaataaggatccgttcaaaatcttgcgttaaagaagaagccaaatacatgctctgaataatcaagcatgattgcttgaaattgatggcatattgatacttgcaatgcttttgcggaatataggcctgtgcatcaatttgactgattgcattaaacataatcatatgggcataaatttccatttcaataaatttatcttgtttggaatggaactgtacactgcctaaagaatacttcaatttcttgaaggaggtctcaataccccaacgcagatgataaagctctttaattctttttagcggataattttttcgatcaagattggttagcacaacttcccattcttctttgcctgatttggcatcattaattctaaatttgcaggctcgaaattttattgtgcataactcgccaaaatcccagcttagatcctgggtatttttagagcgatacttaatatattggcgataatgatgctggacatggtgaatattctcactggctttatgcgtgatgtagtaatagttagaagtagttaccaggcaggaaatctcacgatcacattcttgatcaggcaatgtcgttatttctttaactccgccttgtccagccttagttcgtattatgtaatgacagttaggcaggcgattgcagttttcaatcatattgaaactagtgtagccacgatccattgttacaatatatggaccacaattcaaagctttaagcatttgaacagccgctttgcgttcatccatttctgatttaggctgaaaaatacaatcctggtaggtattattcaatagatcatataaggcattaacgtgaatttgacaatagggtttctttttatgagaagaagcttgtacaatgttattcgatttcggattccagatttgattaaagtcagagccatcaatggcaaacaaacggtagtgatgatcaaaaagttgaatattaaatagattttgattaaaaacagtcagaatatgtttaaaacaagcaggagaaagctggcttttgcgttgaacataggcagaagtactaactactttatcgttctttttagttgcatcttcgccaaaagctctaaagagttcactgtttaaattctgaccttgcatgttaattgtagttttaaggactgtcgctgcatctaaagtgcgtttcctggtaaaagcatgaggattattaataaaatcgtgaatatgatccccagtattattgataatttgatcaagacgttctagaatattcttatgaagggctttcataattaacaccatctttctggcaataattttgaaggtttaaaatatataatatataagataggcgaaaaggctggtcttttcgcctttattttatacaaaaaaagagatcgaatccaaatgattcgatctctaaaaaagcacccttaattgtcaatgtcttaacttaatgacattggaaaaaatcggtctgctttttgattttcgcttgaaaaaagcaagttaggctagtaaagtaaaactaataattttttgaatgagaaaaggagagcttaaatgtcaaattgggatacaaaattcgctaaaaaaggtttaacgtttgatgatgttttattaattccagcagaaagtcatgttttgccaaacgaagttgatttgagtacgactttggcggataacattaaattaaatattccattgatcagtgcagggatggatactgtaactgaaggtgcaatggcaattgcaatggctctccaaggtgggctaggcgttgtgcacaagaatatgtcaattcaagcgcaagctggtgaagtagccaacgtaaagagcgtagttgtgccaactagtgctgcaaaggccgcaactgatgatcaaaaccatctgctctgtgctgcagcagttggtgtaaccagtgatacttttgaaagagcagaagcattgcttgaagctggtgctgatgcgatcgttatcgatactgctcatggtcactcagctggggtattgcgcaagatcaaagaaatccgcgatcattttccagaagcaactttgattgctggtaatgttgcgactggggatgcaactagagcactgtttgatgctgatgttgatgtcgtcaaagttggtattggccctggatcaatttgtactactagagttgttgctggtgttggtgtgccacaaatcacggctatttatgatgctgctacagctgcacgtgaatatcacaagccaatcattgcagatggtggaattaaatattcaggtgatgttgttaaagctttagcagcgggtggcaatgctgtcatgcttggctcaatgctatcaggtactactgaagcacctggcgaaatttttgaagataatggcaagaagtataagcgctatcgcggaatggggtctgttggtgcgatggcccaagcacacggttcaagtgaccgttacttccaaggtggcgtaaacgaagctaataaacttgttccagaaggtgttgaagctcgagtagaatataagggcgatgtttctgatgtagtctttcaaattgatggtggtctccgttcaggtatgggatattgtggtgctgcaaatattccggaattaattgataaagctcaatttgttcaaatcactaatgcaggtttacgtgaatcacatccacatgatgttcaaatgaccaaagctgctccaaactatacaaaatagatataataaaagttaaaaataagagagaaagcaaaatttctctcttatttttttaattttttggacattttaactagatatatttatttcttttggtataattaaaacaacattaaaaagtaaatgaaagcataaaataaaatgagggagcaattaatatggctagatacctattaaaacgtatattttatatgatcctcactttgcttatcgtggctacggtaacttttttcttaatgaaattgatgccgggttcaccttatgctaatgaagcaaagatgacgctaactcagcggcaaattatggatcaacagtatggtttaaataaacctatctggcaacaatatttgatttatattgcggggatgcttcacggtgattttgggacatccttccaatatagtaaccaaccggtagcttcattaattggggcgcgtttgggtgcgtcagtacaattaggtttacaagcattaattttgggagttgtccttggtgtaatcgctggggcaattgctgctatgagacagggtacttgggttgactcaactgctactgtaatttctattttgggtaaatcagttcctaactttgttttagcagttttgcttcaatactacatcggtttaaagctaggttggttcccaattgctggttgggggcaattttctcaaacgattatgccaacgattgctttggcagttggaccatttgcggaaacagctcggtttatccgaaccagtatggttgataccttaagtagtgactatattgagttaggtaaggccaagggcttaagtagaatggaagtcattagaaaacatgcaatgcgtaattcaatgattccattagtaactctgattggtccttatgctgtagccttgatgactggttcaatggttattgaaaatatctttaacgttcctgggattggtgaacaatttgttaagtcgattttgactaacgactatccaacaatcatgggaattacgatggtttactgtattggattagtagtaattctgttgattactgatattgtttatggattaattgatccaagaattagattagatgaaagcgaggcctagaagacaatatgactgaagaaaaattaaaccttcctgcagatgcctttgaacccttaccaaaagatgaagcacaggataacgaaaacattgcaggtccatctttatcgtttgcacaaaatgtttggcttcgcttcaagcagagaaaagcagctattatttctgcaattattgttattttgatgattgtagtagcttttggttcaaccccattcatcaataaatctactttagttaaatcgcacccacaatatgccaatttacctgctaaagtgccaggaatgagcgcaattaacgggttgaacggtaagattaagcaaaatggcaagtgggttgatgcttatgcccagaatggcgtgcctaaagataagtattttatcgcaggtacagattatttaggcagatctttgggacaaagaattatctatggtacaaagatttcattgatcgtcgctttagttgcagctttctttgatttaactatcggagtcgcgtacggaatagtgtccggctggaaaggcgggggagtcgataacgtaatgcagcgaattatcgaaattatctcttccgtgcctaatttaatcattgtagttttgatgttggtggtattaaaaccaggtattaagtcaattatcttggcaattgctatttcaagttggacgacaatggcacggcaagttagagcagaaactctgagtttgaaaaatgaagaatatgttttggcagctagatcattaggtgaatcaccttggaaaattgcttggaaacacttagtgccaaacctttcaagcatcatcattattcaaacgatgtatactattccaactgccatcttcttcgaagccttcttaagtttcatcggaatcggtatttcagccccagaaacttcactaggtgtacttttgaacgaaggacaaaagaattttcaattcttgccatatcagatgtggtatccagcaatcgtattgtgtgtgttgatgattgcctttaacttattaggtgatggtttgcgtgatgccttcgatccacggggacaaagatagaaaggattaacctaaatgccagaagaaagagttttagatgttaaaaatttaaaaattgatttccacacttatgctggtgaggttaaagctattcgtaacgtttcctttcacctaaataagggagagacgctcgcaattgtaggagaatcaggttcaggtaagtcggttactaccagaagtattatcggtctgttagcacgaaatgctcagattgaagacggtgagattgatttccacggcaaaaatttgctagagttatctgaaaaagaaatgcaaaaaattcgtggtaacgaaatttcgatgattttccaggatccaatgacttcgcttgacccaactatgaagattgggcagcaaattgcggagccattaatcaaacataagggtgcctctaagaaagaagcttgggctaaagccttggaaatgatgaaggccgtgggaatcccaaatgcagaagaacgaattaatcaatatcctcaccagttttcaggtgggatgagacaaagaatcgtaattgcgattgctttaatttgtgagccagagattttgctggctgatgaaccaactacagctctagacgtgactgtccaagctgaaatcttggacttgatgaaagacttgcaaaagcgggttaagacctcaattattttcattacgcacgacttgggcgtggtggccggtatggcagatagagtagctgtaatgtacgctggtgaattcttagaattcggtggtgttgatgaaattttttatgatccacagcatccatatacttggggcttaatcaattcaatgcctactttaaacagtgatactttggagtcgattccaggtacgcctcctaacttgcttgatccgcccaagggtgatccttttgcaccaagaaataagtatgccatgaagattgatgtggaaagaaagccaccatttttcaaggtaactgatactcactatgctgcaacctggcttttagcaccaggtgcacctaaagtggaaccaccagctgaaattacacgtcgctggaaaaaatataacttgatgaaacaagaagataaactgccagaggttaactagtcgcggtaaaggagatttttatgccagaaaaaaagaaaattttggaagtaaaacatctaaaacaatactttaaaaatggtcgtaatgtcaccaaggctgttgacgatgtaagctttaatatctatgaaggtgaaactttcggcttggtaggtgaatctggttctggtaagacaactactgggcgctcaattttgcaattgtataagccaactagtggcgaagtgatttttgaaggcaaaaatgtagcagatttaaaaagtcgtgcagacaaactagcttttacacgggatgcacaaatgatctttcaagatccttatgcttcacttaatcctagaatgactgttgaggacattattgctgaaggattagatattcaccatttggttaaaaataaagatgaacgaactgagagagtagaggaattattggaaactgttggcttaaatgcaagtcatgctagccgttttccacatgaattctcaggtggtcagcgtcaaagaatcgggattgctcgcgccttagccgtagagcccaaatttattgttgcagacgaacctatttcagctctagacgtatcaattcaagctcaagtagttaacttgatgattgaattacagaaaaagcgtggtttaacttacttgttcattgcccacgatttatcaatggttaagtttatttctgaccgaattggtgtaatgcactacggtaaactactggaagtaggtccagccgatgacgtctatgatcgaccacttcatgattacacgaagagtttgatttctgcagtgccaattcctgatccagaagttgagcggagccggacaaggattccttatgacgctcaaaaagaagaaatggacggaaagcaacgctcaatgcatgaaattcgtccaggacacttcgtacgctgctctgacgatgaagtcaagcattacgaagaagtagcggcaagctacgaaaattagataccaaatctaatgcaactctctctatattaatattatatttatgctaaaaaggcgatccgatatggatcgcctttttatatgatcattgctcgttaagctaatgaatcccatgctggtaggtcagtgattggaccttcagcgagcttcttttggttttcagttaagtacttcttgtggactacaacttcgtaaacatagtccttaaaccattcattattcatgacgtagaagcctttaacaccagatttatcgccccatgagttctcaactttccattgacgaacttcgccgttgtcttcatcaacaccaactaaagtcatggcatgtgacacttgaccgacgccggtctttaatctgtctgctttagacattttaaggtcaacgccgaataagtcatctaacttgtacaaattagtgtcaaggtaaccagttttacggtccatttgacgtaaaacatcgttaccaaaccaaacagcttcgccgtcttttaattgagcgatagcagcgctggacaagtattccattggtacattcaaaagcttgattctcagtgagccttcaatgttgtcttcagctggtagaccataaagcttgttatagtcatggtctggagcattggttaaaacaacatagtcatcaaaatcaacgtcgcccatgtacttgtgtaaaaactcaagtggagttaggttcttttctaaatgatatttcttgtcgtcatcacgatattcaagatcgaaagtcttaggtggttcacctactgcgatagcagtcatttggtaaacttcgcttaaaaatttttcgcgaacctttttaatttcatcatctttgccgtattgcttcaagtggcgcaatactaaagcatccttctttaacttatcgcccaaagcagtagcaaaaccagttgtatcattggtgttaaaagtttctggcattgcatatgaaggaacaacaccatatttttcaactaaagcggcagccatttggaattgtccaccatcactaccagcaaagtctaagtcagccttaacttgacgtgaatcaagtggcatgtcagcactgtctaagattctgttgtagaacatgttagcacgttcgatcttatcccagaagaagttgtaagcttgtgagaaggtgaagtccttagccttatatttcttaccaaaagcgtggcgcaaaacgttcaaagtcgcaaacagccagcaacgaccagaatgtttttggttagtgacattatttgtatcaagttcagttgaaaagacgcgggttaattgtccttgaacacgatcattataagatgcttcaagtacaccactgcgttgagctgcacgagcaacgactttattttcaggttttttattaaattcggcagagaacttttctagttcctgcacagttaattcatgagccataaaaaatctccttttcattttataatttttttctcaatttaattctattttaaagcaaaacaaaagcgggttcaatcagaactcgcttgagagaattattaatccgtcaacttattagatttcttgcctatatctaataaattaatcaatttggatagaattgccatcattgccagcagtttcctttggcaaagtgatggtcaatacaccattatcatactttgcatgaatctcacttgcaactacatttggtaatctatagcttctagaaatactgccctcacttctttccttatgaatgatatttctatttttatcgctagtgtccttaaatgattttcttgtgccgctgacatttaacgtaccgtcattatagttaacgttgatatcctgcttatccatgccaggcatgtcaatcttaactagatagtccttatcagtttctgcaacatcagattgcataatgttttcaatttcattatcgtcaaagaagtttcttggaaaaccaaaccaatcattcattgcatccatcatgtcgttgcgccgattcatcatattgtttgccataaataaaacttcctttcatttttgtatttgcttaattagaatataaggaaaagatcaactcatttcttgatctcttttctccttacactgtttattgtagtcgctttttatagaaatgacacaaattagcactcaaaaatttatagtgctaattttagactgataacgctgctacaataacattctgagattgtagataattattacgtatagaaaaataaagaaagtttgtgaaatagaaatggtatatttttagaaaatgacaccagaaggctatcaacaaattgaggatgaaattgctcgattaaaaaaagatcggccacgtagaattaaaattttgcaggctgcacgagctttaggtgatctttcggaaaatactgaatatactgaagcaaaacgtgatctaggtcacttacaaagtcgtctgcgttacctaggcaaacaattaaagtatctaagtgtataattttttacggtaagttgaataaataattaaaaaagcccaagtcctttgaatttggacttgagctcaaacaaaaagaccagtagtctgatgttaagaacaaaaaacacattagaagctggtcttttatgaattcaattgtaactgaaatcgcaaatattataaagtctgaagataattatattaagcgtgaaagaaaaataatctgtttcttcttaaacctgattaaggaaatcatggccttggctttagctaaagttgatgatgaaatgattaccaaggttaaagcacagggctatcagattgataagaagaatgagcgctcaatcaatatggcttttggcgaagttaggtatgtcagaagaagatatgtctgcccaggcaaacaagcaaggtatcccttggatgaattaatgggctttgacaaatacaagcgctacagtattttagcagtcaaaaacatcttagaagtaagcagcgttgccacttatcgcaatactgctctagcagtcaattgcctgtctggctttaatattagccatatgcaggtgggcaatttggtaaaaatggccgggaaaaatattaaagctggccaagaagcagattcaagatatgatgccgcaggcactaagaaaaaggtcccagttttgtatcttgaaggcgatggcgtggtgatcaaaggcactaaaagccggttggaatttcatcgctatcaggtctgtgaaggcattgtcaatataagcaagaaacgcagaaagcgaatcaatgccaaggaatttgtttctttaagccgacttgatgcgctgaacgaagccaaggagtacctggccaatacttatgatctttctgatactgtaattcttagcaacgccgatggcggtgctggatatgccaaaacagacttcgatgacattgtagggctatgcaagcgtcatgagcatttcttggatgtctttcacctaaataagaaaatcaaagaaaggctatattttgcgcctgacctgcaaggcaagctgatttctgctttggaatacaaatacagctatgacaaagttaaaactatcctaaccactgcagaaagccgactaattgatgaattgaataccgagctcaatcatgattatctggggcgcctaaggaattatattgatcgtcattgggacgatattaagccgtttaagaaacgaaaactgactgtgactaaagccattggctgctgcgagagcaaccaccgcaagtatacctaccgtgttaaggggcaaggcaagaaatggtcaaaatctggagcagaaggcatgcttaggatcttaagctgcatcaagaatcgagagctggaattttggcttagcagcgagtttgaagattcagaaataactgtattgactgaacaggaattaaaagcagcggcccgtgacagcttaaagaagcgtcatgaagttcatttaggcatccagcatggcgcattaaccgcacaggtagctggcaatagttatttaagcaagctaagcagaaatttaagtcatataaatatttaagaaattaaggttagactaatggtttaaaggctaccgcaaaaacattgacacttactaaataagttgagaactataataaactgtctttttctggtataatatgggttttgtaggatacaattcagagtaggagtgaagaatttgaatacgccacaatcaagagagggtaatgtgatccgctatgccgtttatttagctggctatgtcgctgtgtttgcagtagtaaagctagttactagaaaatctccggttcatatttgggatttgattttattcggcttagttgcagccatgattctgttgttttatgtttatcgtttcaatcgagagcaacgcttttttgcccgtgattttaaacttccatggttgggcagtttgtcaactgttgttctattaacattagtgattacagttacacagatttcgatttcatacttacaatcatatggcaggattagtcattatgatttccaattgatatatgccaaaagtgaatcagttaacatgttttggtttttaatcgttgtccaaggaattgtattaccaatcctacaagaatttttggcgactggctttttgttcaattatgcttttcggcgaaatactaagcaagttgcaattatggggatcattgtttcaggtctgatttatagcttactgagctttcaaaattcagtagtactgtttattattgatgcaatttatggcatggtgtttgcttggagctatatgtacacacaaacattattgatgccaatttacttagctgtagttagtggcgtacttacagtgattatgatttaaaaacaaaaggatgagaaaaattctcatccttatttttgtataaaaaaagcggatagcgtgaatcgaacccgcatctacagcttgggaagctgtcgttctaccatttaactatacccgcaatatgtttttattttagcattttttctatttgaagatcaacacttttacgatcaattaagctggtaaaattttgaaaaagccagcggcgtagttcgttgggcataacaactagaggcattctattatggattggcgccatatctttgttaggcgcggtagtaaccattgaaaaataatcctgatcataaatacctgcaattaaggtaagtggttgattagtgcggaaggcgtagctatcatggtatttacgaccgttttcagcaatatgggtagttttagcatattcaaagaatttttcggttaagattaagcaacgttgcttggcaaaggatttgtcccacattgaaggcgctgaatcataaaatcgctcaattctagcgttaaataatggcttttttggatcaacgggacttggatagccccattttttgttgtttaattgcaattgaccattttgataaagcaaaacaggtgctacttggttaggaaaaatatcttgtgcttgaatgtcaaaatttggtgtaactaagggcaggtcaagatcgcttttgagatattgttgaatttgttttaaattaggtaaacgaaactggttgcacatacgcatttcctttctttagggctagtttaatcatagcctattttttgttaaaattaggtaattaaacaattaatattaataaaaaaataaacttaaaaattagaaaagagcaaaaagatggcgaaagaaattttattaactggtgaccgtcctactggtaagctgcacattggtcactatatcggttcattaaagaatagagtaaaattacaaaattcaggtaaatatgatccatatattatgattgcggatacacaggctttgaccgacaatgctcgtaatccggaaaaaattcgcaatagtttgatccaagtagctttagattacttagctgttggtattgatccagctaaatcaactatttatgttcaatcacaaattcctgctctatttgaattgactgcttactacatggatttagtaactgtggctcggcttgaaagaaatccaactgttaagacagaaattaagcaaaaagatttcaaagactctattccaattggctttttaaactatccagtttctcaagctgctgatatcaccgcttttaaagcaaccgttattcctgttggagatgaccaggaaccaatgttggaacaaacacgtgaaatcgttaggacttttaaccgtgtttataattgtgatgttttggttgaacctaaaggttatttcccacctaaaggtcaaggacgtttgccaggacttgatggtaatgcgaagatgtcgaagtcacttggcaatgcgatttatcttgctgatgatgcaaagacagttcaaaagaaagttatgtcaatgtacacggatcctaaccatattcacgttgaagaccctggtaaggttgaaggtaacactgtctttacatatcttgatgtcttcgatccagataaggacaaggtggcagaacttaaggcagaataccaaaagggtggcttaggtgacgttaagattaagcgttacttaaacaaggtccttgaagcagagcttgcaccaattcgtgaacgtcgcgaaaagtttgctcaagatgaagatgcggtttatgaaatgcttctggaaggttcaaaaaaggctaataaagtggctaatgcaacacttgaacaagtccgtgacgcaattggtttgaactatttcaagaatagataaggctgaggtaaagttatgcacgatcgaattccttggaaacaatattttatgatgcaggcgctagtaattgcgcaacgctctacttgtaatcgcgcattagttggtagcgtcttagtaaaaaataatcggattattggcactggttataatggttccgtttcaggacaaccgcattgtgacgatgtgggtcatcaaatggttgatggtcactgcgttagaactattcattcagaaatgaatgcgatcattcagtgtgctaagtttggtgtttctacagaaaatactgagatttatgtgacacattttccttgctataattgctgcagatccttgttgcaggcaggcgtgaaaaaaattaactattattttgactatcgcgataatccattggcgatgcaactacttcatgatagcggggtgccttatgaacagattaagattaatcgcaaatacgtggaaagcttggcccataaacttgaagaagacgagaattaatttaatttggttaatgggactagtaactgtatttttaataacgacaggatttgtccagccaaatattgaagatcatgctcatattttagataaagaaactcgcactttgattacggaaaaaaataatcgctattttcagactaaagaacaaccgcaaattgtcgttataacggttaaaaggctgaataagttaacacctaagatgctagatcattctaagcgaacggtctttattgtggtaggacagaaaggtaaaaagcgtaatgtgcaaatttattcaactaaagatttgcatagtgccttcaccgaggtcgctcggggcaatatcttgcgtgctgaagtagataaattgcgtagtcaaaataatgcaacttttaacaagggaattcgcttcgtctttcgggcatgtgcgactagagttgatcaacaatatcaatatgcacttgataaatatgatttgacgcaagcagaacaaaataaagtcgcgcgtccacatagtgtagctttaccaatcgcactggcactggcatttttaattacgggaattacttatttcttgcgtagatttagtcatcgtgatccaatttctaagaaatagtcggcttgacttatttgcattttgtccttacactttttatagacataattagcgaaaaactgttaggtgagactcctacgtgaacacacgctatcgcccagaaacatccagagatgccaacgggttaaataggtgtcgtcgacttaaggcgagatccagatagctagcatgtgcttacgtcacgtagtgttaaaactgaacgacgagtatgacagagccttgtttggcaaaagtcacctgcagagttacaggtggcttttttgttttgcttgtcccaattaaagaagggagcaaataatgttaaaagcagctagcaagaagcgatcgaatatagacattcaaaggattcaacggattgcgcgtgagtcacgtagcgagacgctggcgcgtttacaggcgagtgctgaagggctttcgactaataaggctgaagaaaacagaagagaatatggcaaaaacgaaatcattactaatagcaattcctctaaatggcgcttattatgggaatcaatcgctacgccatttacgttggttttattagtattaactttattaaccctgtttactagctatattttggtgccacaaggagataatgacttaattactacgatagtgatgatcgtgatgttgattatctcggttctcgtcaattttatccaaaaaatcagaattgctaaggtaactgatcaattactcaatatggtatcagttacaacgaatatccggcgtgatggcaaaaatgtggaattgccaacagatgaagtagtggttggtgatgtaattaacttgtcggctggtgatatgattccagcggatatgaagttgttaactagcaaagatcttttttgctcatcaagctatttagatggggatcctgagccggcagaaaagatggctaatgtagtaattaagccgagtatggctaatgattatttgaactaccctaatattctatatgagggaacaactattgtttcaggctctggcaccgggattgtttttgcaattggcaatcacactgtttttggcaaagcagttcaggctatttcccgtaaaaaagtaaaaactaccctgtttgaccgggaaatgaagcaattagctaaaatattgattatcgcgacagcaattgtgattccgcttttgtttgtgattaatggcctgactaaggggaattggggggggaaagcttaattttcgctttgacagcggcagttggcttaacaccagaagtgttgccgattattgttaattccaatttaacacggggcgcacgggaaatatcccaaaatggtgctgtcgttaagcaaatgaatgctattcaaaatttgggctcaactgatgtgttctgtatcgataaaaccgggactttgacacaaaatcaagtggttttagagcgtcactatgatttagatatgcaagaaaccccacagattttgaagttttcatatttgaatgcatattatcaaactggggtaaaagatttaatcgataaggcggtaattgatgccgcgggcgatgaactagatgtaaacgaaattcagcgtgattacaataaaattgacgaaattccctttgactacactcgaaaaagaatgagcgtggtagtggtagataacgatgaacaccacgggcagcacttattagtaactaaaggtgccgctgaagggatgctggcaatttctaataaggttgaacttaatggaaaggttgaggatttaactactgcctggcgagaaaagatcttaaatcagattaatgaattaaacgatgacggtttacgggtacttttagtaggttataaattaaatcctgccccagtaggtgagttctctgctaaagatgaacatgatttaaccattattggctatttggcttatcttgatccgccaaaagaaacaactaaagaagcgctggaagatcttaaaaaagattatgttgatgtcaagatttttactggtgataacgaagcagttactcgtgctattgctttgcaggtgggattaaacgttgatactgtttatgacggcacccagatcgaagcggttagcccggaagagttgcgtgaaattgttgaaaaatgcgatatatttgtgcgaataaccccggaattaagagtaaaaattattaatgcactcaaagcaaacggtcatacagtcggttatatggggaatggcaataaagacgctttagcaatgaaggtagctgatgtgaccgtaacttcgaatacgtcagttgatattatcaaagagtcagccgatattatttttgagcaaaaagatttgcagctgttagaagaaatgattctaatgggccgaaaagtcttttcaaatacaatgaaatatattaagaccttcttggtaactaacgctggtagtgtaattgcgatggttgtttcatcgctgctcttgccatttttgcctcttttgccattgcaagttttaattttaaatttgctgtttagcataagttgtctggttattccctttgatagtgtttctaaaaactatgtcaaaaagccacaaaaatggtcgattaagagatggccgaagtttgtacttaattttggtccgattctagcaattattgattttatcgcaatgggcttgatgttttatgtgatttgtccatatttagtagggtctaattatcatcattgggtctttatgacactattttattcggggatttttgtggaatcgctttggacaagaattatggtgattcacactttgcgtgatgaacgttttccattctttaagcaacatgccacgccagtggtgttcttggtgaccattggtatggcaattattggtacaatgttgccttcatcaagtatcgcgccaagtttgggcctagctcaattgccgtttggttattggggcatagtcttcttgctagaagtaatctacattttactgacgactttggttaagcacttatatttaaaaaaagaaaaattctgatttgaattaaaaggaattgctggttttagcccaattcctttttttgcatgttaaaataaaatagatattttagacgattaaaggagtttgattaatcaatggctgataaagatactttttatattacaaccccaatttactatccatctggtcgcttaacgatcggtaatgcttatactactattgcagctgatacaatggctcgttacaagcgcagtcaaggctacgatactttctttttaactggtactgatgaacacggcttaaagattgaacaaaaagctgaagcacaaggaattaagccacaagagttcgtcgacaagatggcggcttcttacaagaaattatggaagagtctcaatatttcttacgataagtttattagaacaactgacaaagagcacgtagctgccgtacaaaagatttttgaaaaattattagcaaaaggtgacatctacctaggcgaatatactggctggtactcagttgaagatgaagaatactttactgaatcacagcttgctgaagtttacaaagatgatgatggtaatgtaatcggcggtaaggctccaagtggtcatgaagtacgtttggttaaggaaccatcctacttcttcaagatgagcaagtatgctgaccgtttggtggaatactacaaggaacatcctgaatttattttgcctcattcacgtgaaaaggaaatgcttaataacttcattaagccaggtttggaagatttatcagttacccggactactgttaactggggaattcctgttctaagtgatcctaaacacgtggtttacgtttggatcgatgcactttcaaactatattaccgctttgggctatggttcagacgatgattcattgtttaagaaatattggcctgcagacgttcacttggtaggtaaggaaattgttcgtttccacactatttattggccaattatgttaatggctcttgatttgccacttcctaagcacattatcggccatggttgggtattgatgaaaaatggcaagatgtctaagtcaaagggaaatgccgtttatccagaatcattgactagtcgttatggtgttgatccacttcgctattacttgatgcgtgctcttccatttggcgatgacggtatttttacaccagaagactttgttgaaagaattaattatgacttggccaacgatttgggtaacttacttaacagaaccgtgtcaatgattaatcaatatcaagctggtcatgttgatgcagttcccgttgctcaagctgaatttggcaaagacttgcaagatacagctgctagtgtcattaatgattatcgcgaaaatatggattcacttcacttttcaaaggcattagacaatatttggaagttggtttctcgtgctaacaagtatattgatgaaactactccatgggctttgaacaaagaaggtaaaaaggaagaacttagcaaggtcatgagcaatttggctgaaagcttgcgtttaattgctattatgattgaaccagtaatgaccgaaactgcaccaattatgttcaagcaacttggtttaaattgggacaatgaagacgctaagcatttggcctttggtgactttgattgggatgttaaagtaattgaaaaaccacaaccaattttcccaagacttaagatggacgaagaagttaagtacatcaaggatgaaatggctaaagctaagccaaagaagaccactagaagtgaacaaaagaagggtgacgaaatcaccattgacgattttgacaaggttaagatccaagtaggccaaattttgtcagttgaaccagttaaaggctcaagcaagttgctcatgttcaagctggactttggtaatggcaaggaaacccaaattttgagtggtatccgcaagttttatccagatgcaagtgagctattagacaaaaaggttttagctgttactaacttaaagccacgtaagatgctgggtcaccttagtgaagggatgctcttatcaagtgaaaagcatggcaaaattaagttagctcttgttggtgatgaacatgcagttggggctgaactcggctaatggagatcattgataatcatactcatttgaatgacgagccgtttcgcggcaaggaacaatattatttagaacgagcaaaagcacttgatgtaaccaaggttatttgtgcggggcaagatcctgactttaatcaaagagcggttgacttagcacaaaggtttgataatgtctatgcgatggtcggttactgtcccgatgtggctaaagactatgatcaacaggctgaagataaactaattgaacaattgaagcagcctaaggtagttgcaatgggcgaaatcgggctagattattattgggatgaatcgccgcgcgacgtacagcgtaatgtttttgcgcggcaaattgaagtagcacatgacttgaagatgccagttgatatccatactagggatgcatttggagattgttataacatcttgaaaaatagcaatctggaatatggtgctgttttgcatagttttaacggtggtgttgactggttaaataagtttttggatttgaatgtttacttttcatattcaggtgttgtttctttcactaaggctacggaagtacacgagagtgcaaaagctgcgccacttgaccgaattttagttgaaaccgacgcgccatatttaacgcctaagccatatcgtggtcatcaaaatgaaactggctacgtacgttatgtggcagaagcaattgctaagttgaaggatattccactagagaaagtggcggatgctacttataagaacacagtgagagtttatgggcttaaataaaaagaattttgatgcggtaatcgttgttgaggggaaagacgataccatccgtttaaaacaatttttcccaggaatcgagacaattgagactaatggatcagccgtttcagatgaagtattgaagcaaatccaaaaattaagtgagagtcggcaaattattgtctttactgatcctgactttaatggcgaaagaatccggcgcattgtaactaaagctgttcctgatgcaaagcaagcttttattacccgtaaggaaggcgaacctcataaaaaggggagtctaggtgtagaacatgcttcaaaagaagcacttgagcatgcactaagtgatttgcatgaggttgaaccgcaaaaaagtgatttaactccagcaatttatcggcaattaggtttagctggtggtagcggctcacgaaaattacgtgaacaagtaggcattaaattacgagttggctatggcaattccaagcagttttataatcgcttgcatacttttggcgtttcattagctgaattaaaggcagctgtcaaggaggtagaaaatgacaaataatattccaattggctctccagttagaacacaagcaattgttaaccgttactttgtcaaagctaaaaagaacttagggcaaaatttcttagttgatcagactgctattttaggtattgttgaagctgctgggataaaaaaagatgatcaagtcattgaaattggaccaggtattggctctttgactgagcaactactgttggcaggtgctaaagtttttgcttatgaagttgatgatagcttacctacgattttacagaatgaactgcctaagaaaattgatgatcagcctttggctagtcgctttaagctgatcttgaaagatctattaaaagcggactttaaggtagatattagtgacttctttgattttactaagccaattaaagttgtagctaacttgccgtattacatcactacgccaatcatttttgccttagctgaatcagatttgcactttacttcattgaccttaatgatgcaaaaagaagtagcagaacgattagaagcccaaccaggcagcaaggaatacggtccgttgactatttccgttcagaccgaaatgaatgttaaacttgctttgcaggtgagtcataattcctttatgccgcgaccaaaagtagactcgagcgtagttgtcttaacgccactgaaggaaaagccagcaattgaaaatcgtaagcattttatttgggtagtgaaaatgtgtttttcacaaagaagaaagacactcaataataatttaaaagctttgttgcctgataaaactaagcgtgatgaattatttgcggaattaggggtaaatccaagaattcgccctgaagaattaacaattaaacaatttattaaaattgctagctttattcctgcaagatgatgtataatattgaatttattatatatttgtgataaaatgttgctaaaggagctgttgtttagtgccaacatcaattatcacaattaaacataagttggattctcacttaggtgatactttaacagtagtagctcaagcgggtcgtaagaaagttactaagagacggggaattctaagagagactttccctgcagtgtttgtggttgatttagaccaacatcaaaataattttaaacatgtttcttacagttataccgatttactaactaagaatattgcattagagtttgatgatgaagctgaagaggctgaagcttaaacacaatttttgaaattgtcactagcatttatttaaaatgttagtgcttttttttgccctttagagtatattaattaagtataaaccaaacattagaaaggagatttcatgaaacgttcagaaagattggtggacatgaccaaatatttaatggagcgtccccatactttaattgcactaccattctttgctaagcgttacggcgctgctaagtcatctatttcagaagatttagctattttgaagcacactcttgccagcaatcaagatggtattttggagactgtagccggtgcagctggtggcgtgcgctatattccatttttaggtaaaaaacacgcggaagcatatttgtcagatttatcaactaggattgaggatccaagtagaattttagccggtggttttgtgtatctgtcagatattttaggcaatacgcaagatttacgtaaaattggtgaattagtagctactcattatgcttatgaagaaatcgatgctgtcatgacagttgaaacaaaagggattgctttagccaaagcagttgctcgttttttagatgtaccatttgttacagctagaaagcgatcaaaggtaacagaaggtgctactatttctgttaactatatttcttcatcgttgtctcgagtatcgaagatggaattaccgactcgtgctcttaaaaaagaagctaaagttttaattgtcgatgattttatgaagggtggcggtaccctaaccggaatggaagaattagttaaggaattcgatggtactattgccggcgtttgtgtactctgtgaagccgattttgacaaagaaaagctgattaagaactatctttcattagtaaaaattagtgaaattgatactgcccaaaagctgattgtagcagaacctggtaacttcttaactgaaactgattttgaccgtttctaaaatggtatactagaatcaagttttgattattaagaggttaatattaatggaaaaatatgtagttgttcttgccgcaggtaagggcacacgaatgaagtcaaagttgtacaaggttttacacaaagtttgtggtaaaaccatggttgagcatgttgttgatgcagctcaaggcgttaatcctgcagaaatcgttacaatcgttggtacaggtgctggcgatgtagaaaaagtactggcagacaagtctaagtttgctttccaagaaaagcaattaggtactggtgacgccgtaatgactgcgcgtgaagaattgggtgacaaagatggtgctactttagtagttactggtgatacaccacttttcacaactgatacatttaatgaactattcaagtatcatgcagaaaaaggcaatgctgcaactgtattgaccgcggaagctccaaatccatttggctatggtcgaattattcgtgatgatcaaggcaatgttttacgaattgtagaacaaaaagatggtaaaccagaagaattaaaagtaaaagaaatcaatactggtgtattttgctttgacaataaaaaattatttgaagcattgaagcacgttaataatgacaatgctcaaggtgaatattacttaactgatgttttagaaatcttgcgcaatagtggtgaacgcgttggtgcttacaagatgcctgactttagtgaaagccttggcgttaatgaccgtattgcattagctcaagctactaagactatgcaaagaagaattaatgaacagcatatgcgtgatggtgtttcatttatcgaccctgatactgcttatattgatgcagatgttaagattggcaacgacactgtaattgaaggtaatgttgtgattaaaggaaacaccgaaattggtagtgattgctacattactagtggttcaagaatcgttgattctaagattggtaataatgtcactgttacttcttcaactgttgaagaagctgaaatggacgataatactgacatcggtcctaattcacaccttcgtcctaaggcaattattcgcaaaggtgcacatattggtaactttgtggaaattaagaaggctgagattggtgaaaatactaaagtaggtcacttgacttatgttggagacgctaccttaggtaaagacattaacattggctgtggtacgatcttctctaattacgatggtgtaaagaagttccatactaatgttggtgatcatgcctttattggtgctggctcaacattgattgctccaattaatgttgcagatcacgcctttattgcagctgataccactgttactaaggacgttaataaatatgacatggcaattggccgtggccgtcaagttaataagccagattattggcataagcttcctctttctcaagataaagaatgggattaagaataaggcactagtgtatcaagctagtgcttttttgttaagaattgctaaatacttattgcaaaataataattgagacctacaataaggtgtactaataataatttttacatgaggtaggtaatacaatgaaattaagtcataagttagttatggtttcagcagctgttttgatgggtgttagcccagtattaggcatggcagaaaatactgtatctgttcaagctgctactaagagtactaatggcgtacataatacttacggtaaaaacagcaaagtcaaagtaactaagactatgaagtttgtcgaccgtaatggtaagaaaacttctaagactgctcctaagggtggtagctacactatttggaacgtcaagaatatcgacggtcaagtttactacagtattcaaactgatttgaagtactggattcctgcaactgcaactgaaggtacagtaacttataagtcaggcaatactacttatactttaaagagtgatggcaagaaggtaacaacttctacttcaactaagaaggctgttaagaagactaattcaaataaaaacactaaaaaagtagttaaagaatcaactaaaaaaactgccactaagactactaaaaaaagcaactcagaaaagactactaagaaaacttcatcaaagaagacgccagtggctaaggcagttaagataactactaagaataaggcttacgtttacgacaagaatggtaagcgtgtaaaaaactatttaggcactagttacattggtaaaaagatcactgttaaaggtttaggtactaagaccattaatggtgttaaatattatgctttgcaaccaaatcattattacattaaagcttcagatgtaactgttaagtaataattgataggaaaaagacactttttcgtttctaaattggcaaaaaaatattttagatctacaatatataaatgaactttaagtttagtaagaatgaggtatttatcgatgaaattaagtcataaattagttatggtctcagcagctgcattgatgagtgttgctccacttttgggtactgcagaaaacgtcaacactgttcaagctgctcctaagaagactacttcaaagaaggcagcaaacaacaagatcactttggtacgtaatgcttatgtgtacgataagaatggtaagcgtcttgataagtacatgggcagtgcaaaaaacactactattgctaaaggcgtaactgttacttcaactggcactaagactatcaatggtgtaaagtactacgatcttggtggtggtgcttatatcaaggctgttaacgtagatggtaaagctgcgtcatcaacttcatcactgtcaaagggtactaaggctaagtttgtttctaactcatacatttatgacaagaacggtaaacgtatcagcaagtaccaaggcaaatctaagtttgttaagggtgattcagtcactacttacggtattcaaaccattaacggtaagaagtattaccaacttgacaagaagggtactgcttttgtacgaactgttaacattgatggtaaaaccacttcaaaccaagaatcatctgtttcaaatgatgcagaatcaactaaaaaatatgactactcattaaagaagaatgcttatatttatgataagaatggtaagcgcatcaacaagtaccaaggcaagtctaagcttttaaagggtgccgcaattgatgtttatggcattgaaaccattaagggtaaggattactaccaacttgacaagaaaggcactgcttttgttaaggcaagtaatgtaactagaaccgttaaggcaacttcaattaccatgaagaagaatgcttatatctacaatggtaacggtgacaccaagaagaagacagttaagaagggtaagactgttaaagctactgaagcaagatacattggtactaagctttactacaagattggtgataatcaattcgttaaggctgctaatgtaggtaaaatttcaggcccagaactagaaccagttaacgaaccagatggtgctgctactgttgatactggtgataatactgtagatccaaacgtaaccaaggtaactacgattaatgttgctccactttacaacattaagggacaaccagataacgttagagcatttggcgaaggtcaaagtcaacaagtttcagaattgagatatattgcaacttctgcaactgctaccccagaattattctataaattatcaagcggtagaggctatttaaagcagtcagacgttgctgtaagtggtaagattttaactcctgttaacactccagaacaagctagagcagacgttacagttgctacagcagctgataagactaagttgcttcaagacattaacgaagcaactagtgttaagaactcagaagcttacaagtttgcttcaagtgatgccaaggctgcatatgatagggcaattacaaatggtactgctgttaacaacgatgctacagctactattgctcaagttaacgaagcagatgctgcaattgttagcgctaaggctaaacttaacggtaagaaaatcactgtatcaagcattagtaatttgactccagcagaagtaacttcaattgtacaattggttgcaactgctaataatgtaccagaaagttcaattcaactttcaaatagtggtgctttgacaattgttactaatggttatactcaagttttaaaccttagtgattatgttactcaaacttcagcaacttcaactaactagaaatgcataaaataagacgtagtatctgaaaggacactacgtcttattttttaggatattttcgttgtactagaaagtacaaatatattctaacttttttagcgattaatagttagtgcttttttatggttgcggcaaaattcttgctataattaaggagaatgtggttctttttagagcaacttttgctaaaatagagctggttaaatatttttacggaggaaattatgtcctataaagacgatatgatgatcttcgcccttaactcaaatgtaccattagcacaaaagattgcggatcgtgtgggtgttccactttccaagtctagtgttgaacgtttcagtgatggcgaaattcaaattaatattgatgaaactgtgcgtggtaaagatgtctaccttgtacaatcaaccagtaagccagttaatgacaatttaatggaattgttgattatgattgacgctgtacgtcgtgcaagtgctcgtacaattaacattgttatgccttactacggttatgctcgtcaagatcgtaagactcgtgctcgtgaaccaattactgctaaattggttgcagacatgcttcaagctgcaggtgctgatcgcattctttcacttgacttacatgcaccacaaattcaaggtttctttgatattccagttgataacttaatgggtgctccacttttggcagactacttcttgcgtaacggcttagagaaagacgctgttgtagtttcaccagaccacggtggtgttactcgtgctagaaagcttgctgaattcttaggttgcccaattgccatcgttgataagcgtcgtcccaaggctaatgttgctgaagttatgaacattatcggtaacgttaagggtaagcgtgctatcatcattgatgacatgattgatactgctggtactattactttagctgctcaagccttaattgatgcaggtgctactgaagtttatgctagtgcaactcatgctgttctatctggtccagctattaagagattgaacgattcaccaatcaagaatttggttttgactgattcaatcaatcaaccagcagagaagaagcttgacaagatgcttttggtatcagttggtccattgatgggcgatgctattaagtgtatccaaaaccatgaagcacttagcccattgttcaacaccagatacgaagctgacaagaacaagtaagataaaatttgataataaaaaatggctagccgatgaggttagtcattttcctgaattgtcaaattaagtgcaacagttaggctatgaggaaatatattgcttgaagagttcttctgctgtgtgatattgaaggattcgacgatgtttgcggttaatggcatcagttgcctgttgaacataagcagctgacttatctttcatgcttttgcctttagggaagaattgacgcagaagtccattgcagttctcattggtgcctctttcccatggagaatatgggtgggcgaagtagatctggcagcctttgatcttggtcatatccgcaaactcagagccattgtcaaacgtgatcgatttaaaccaggcaggatgtctgtcaatctcattttgaagcagcctttggcatgtgcttgcccgatagtcaggaatcttgataactacttcaaagcgtgtggttctttcggtcaaagtcattaaagcaggctgattcttgcgtctgacgcctttaaccagatctccttcccagtgcagcggcgtttttctgtcttcaatctctttaggacgctgttcaatggaattgccaagatgcttcttgtgcaaagcatgaccgctatggccgtgatgacgcttgttcctgcgtcttttgagcttcataggcagatcaatattgcttatgtccagcaagccctgatcaatatagcgatagacagttggtgtgctgggacaagggtagcctggcatagtccttttgaattcaccaacgaattcatcgatgctggtggcatcaaatttagctttaaagcgtctggagagcattctcaaaaagacagcataatgcttcaatggattgcgctgatagcagtttttgcgacgcttctcataataaatctgtgcagtatcagcgtaatagtgctcatacaataaatagctgctgtctctttgcaggacacttccgcgtttgatttcgcgactgattgtcgacttatggcagccgacttcttgagcgataacagtacgggaagttatgccggaatccagcattgcttgaatttgtccacgttgtacgctggttaattgatgatagtgcttagaaatgctagaatttgaattggtcataaagatcttcctttcttgatttttcgtcacttcaagtttaggtcttcatggcctttttgtttaacacttagtgttgcacttcaattttaaatccgggggttagtcattttatttttttttgaaaaaatcatcaccatttataataaataagagtgtattaaaatacacatgagaaacatctataattagagatagatgtttttcatttaaagaggacaaaattatgacacaatatttatcattcgatattggcgggactaacttgaaatatgcattaattgatcaagaagggcatattcttgaaaaagaccgggtaaagactaatactgaaaacctagatgcattcatgcagacgatgtatgaagtcgctgacaagtatcaaggaaagttcgctggcattgcagtctgtgctcctggtaagattgatactaagaataaaattatctattttggtggagccttgccattcttagatggcttgaatttagaagagactttaggtaaaaaatatgatgtaccagttggcgtagaaaatgatggtaaagcagctgctttgtcagagcaatggctaggcgaattgcatgacgtcaatactggtatcgcaattaccttaggcactgctgttggcggcggtgtcatagttgataatcgtattttacatggctggacttttcaagctggcgaattgagttggatgattacgaattcaagtattggtactaggaatatggctgcttatgctggctttagttgttctgcggttaatatgatcaaaaaagttaacctggctttggggaatatcgatcttgataacggcttgaccgcgtttgaggcaattaacaatggcgatttaagagcactagccgtttttaaacgctattgccgcaatgtagcaatcatgatcctcaatattcaggcagtaatcaatggctctaaagtaattattggtggcgggattagtgcacagccaattttgattgaagaaattaacaatcaatttgataaaattttgcagaataatccaatgttgaataatcaagtgattaagccggtgattgtggctgctaagcatggcaatgattctaacttatatggtgcactttatgcattactgttggaattaaatgacgaagaagttaggtaaatattgcaacacaaaaaggggatgcgtcgcatcccttttttacatgagctaaataataatttaatctttgccagaaacaatcttggcaatcgcaatgctggcaccagcaacgcaagctaccatggcggttttacaaccaatcttgactacgtcttttaccaaatccttattttcatgaatgaagtcaaaagacattttagtatagtccatgcaataaccatgaactgtgtccatcaagtctttaacttgagtatagccgctcttaggttctgcctttacttcatcttctggattaatttgagttcttacatctgtatttaaatcatttctgttcatcataaatacctcgattctaggatttaccttaattttacttcttttgctcacgttttggtcttctcaaatatcttaaggcaccattcttaatatatttttgaaattgctcataaagtggatcgaaaatttgcggctgatcttcatcgtgactgagcatagttttagggaagaagaagcgttcatctccttggaaagtaccatttaatgcgcgaaccaatgggctgagttgggataactcaatcatgctgccgtcgtcttgcataatttcaatttgactattagcatttttccccgttggcttataagcatcatatggttcatcgaatgcggaattggtagcggtatagtaatcaggattaaagccagcttgcttgattaggctcttgagcttaggtaaaagatttttggtttcttcatcgattcggacactagctagcggttttctgtacaagtaacgcttggctaggtcagataagattggatcttgtgcctgggtccacatagaaaaattagtttccattactccatcatcaagctttaaataatcgtctaaagtccaattgccttcaaggaatttagtcaagctaggtgtaacttgcagatttccctttttataaacagtttgagcgcgctctaaaaggtgatgcaagatgacttccattgagcgtcctacgcggtggaagtagacctgttggtacatctgatagcgtgacacgatatagtcttcaacggcatgcatcccattgttggcaaaacaaataccattttgataaggacggattacccgtaaaattcttgataaatcgaacctaccatagttaactccggtgaaataagcatcccgctgcaaataatccatccggtcagcgtcagcttgacttgagatcattttaaccacttgcggattaggataagtcttagcgattacgctggcgactaattcaggaaagttaggtgcaacttgttttaatgcatggttaatttctgtattaggatcagtaatgatcttttgtccaattttttcatgattggtgccaaaaaggtgctcgaatgtgtgcgaatagggcccgtgaccgatgtcatgaagcaatccggcacattctaccagtaatcgattatcatcgttccagagaccgtctcctggcgtaattgagggatattttttgctaaagatatcgcaaattcttctcgttaattcataaacgcctaagttgtgctcaaatctagtgtgagttgcacctggaaaaacatagctaacaggacctaactgtttaatgcgacgcatgcgttgaaattctttagacttcagtatgtccaaaacaactttatcttcaatatgaatatagccgtgaaccggatcacggagaacaacctcttgttttaatttttcgctttgaaatcttgtcataaaaatccaccaagtttaatttattaattttttgaactatatataataaaatagattatatctaactaaaattatatcagagatatagtaataatgtttaaagggggcgcttgtttgacagcaattacgattgatttgactagtaaaattactcaagacgatgagacagagacttttacgcgacatgcgcaagggcaattgactgaagaaggcgacgtcacacgaatttcttatgccgaagaagggcaaattccagtgaagatgcttctaaaggagaatgaattgttgattcgccgcggcgttgacagcaataattattctttaatgaaatttattccgggtgaaaaaggcaactgccgctatgtagttgaagggcgccgcatggacatgaccagcgtgactaacttgcttgaatatcagagtcaagatgatggttcacgtaaacttcgggttgaatatgacctctttaatggactatacttaataggtaactatgcagtcacgttgatttttacttaaaggcctagtagaatagtaaagattgtataagagaggacgtacagctgtgggattagacaaatttaaagacaaaaatcgcgatgaattgtcaatgatcgaagttgctcgtgcaattttggaagacaatggcaagagaatggcatttgccgatattgttaatgccgtacaaaaatacttgaataagagtgacgaagaaattcgtgaacgtttaccacaattttatactaatatgaacactgatggtgaatttatctcaatgggtgaaaatgtttgggcacttcgttcatggttcccatatgaatcagttgatgaagaagttaatcaccctgaggatgaagaagacgattcacgtaagcaccacaagaaggttaatgccttcttagctagcgctactggtgatgatgacattatcgactacgataacgatgatccagaagatgacgacttagacgccacagacgatgatactgatgatgtattgccagatggcattgaaggtcaattgtcacaattaaatgatgatgatgatgatgacgaagaagataattaatttgcttgacttaagaagaaaaagcagataatatttttgttgggcaccctatgtgcgtttagctccccgttagtgggagcttttttgtttaaaggataagttaaaaggagcagaacatgacaaaatacatcttcgtaactggcggtgtcgtatcttcacttggtaaagggattactgcatcaagtttaggtcgacttcttaagaatcgtggcttgaaggtcactatgcaaaagtttgacccatatattaatattgacccaggtacaatgaatccataccaacacggtgaagtttatgttaccgacgatggtacagaagctgaccttgacttaggtcactatgaaagaatcgtagatgttagaactagcaagtattctaacgtaactactggtaagatttaccaagaagttttggaaaaagaacgtcgtggtgactaccatggtgctactgtacaagtaattcctcatattactgacatgatcaaaaagaagatcatgcgtgcagctttgactactgattcagatgtaattatttctgaaattggtggtactgttggtgatatcgaatcaactccattcatggaagctattcgtcaaatgcgccgtgaagttggtccagaaaatgtaatgtacattcactgtactttggttccacttcttcacgctgctcatgaaatgaagactaagccaacacaacactcagttgcggaattgcgtagtattggtattcaaccaaatatgctggtacttcgtgctgaacaaccaattgaccaagaacacaaagacaagatttctacttttacagacgtgcctgttgatcgaattattgaatcaattgatgctccttcattattcgatgtgcctttgaacttccaaaagcaaggcatggatcaaaaagtctgtgatttcttacacttagagagtccaaagccagaagctgacatggaagcttggaagaagcttgatgaacgtgctaagaccttgaagcatcacactaagattaccttggttggtaagtatgtagagcttgaagacgcttatatttcagttactgatgctttgcaacatgctggttatctttacaacactaagattgatgttgataaggtacaagctgaagacgtaactgaagataatattgcagaaatcatgaaggattcagatggtttgattgtccctggtggttttggtactcgtggtcttgaaggaatgattactgcaattaagtatgctcgtgaacatgacatcccattcttaggtatttgtttggggatgcagatggctagtgttgaatttgcacgcgatgtattaaaccttgaggatgctaattctgcagaagcagagccaaactgcaagaataatattatcgacattatggctgataagcgtgatgaagaaaatattggtggtactttgcggttaggtatttacccagctactcttaagaagggaactaagactcgtgcggcttacgatgatcaagatgttattcaagaacgtcaccgtcaccgttttgaattcaataatgaataccgtgaagcctttgaaaaggctggtatggtcttctcaggcgtttcaccagataaccgcttagttgaaattatcgaattaccaaagaaaaaattctttattgcagcacaatatcacccagaatttttgagtcgtccacaacgtccagaaggcttatttaagtcatttattggcgctgctagtggtcttccagcacaagaattttaaagtgattaaagtttgattatacaaaatcttaagaaaacaagaactgagagacctcagctcttgttttttttgtaaatatcctttaacattattatgattaattgaaagtagaaaaggatttgttttcgccaatgaagcagatgataattcatggtggaaagcccctgcagggtgatgtttggatcggtggagctaagaactcaacagttgctcttattccggcatcaattttatcaagaacaccagtgaccttggaaggcgtcccaagaatagctgatgtagttaacttgatggacttattgagtgagatggatgtacattgtgatttcggtgaaaccactttaagaatagatccaactgatatcaagatgagtccgttgccagctggtaagattaagagtttgcgcgcttcatattactttatgggtgcgctacttggtcgctttggcaaggcagtagtgggcttccctggtggtgacgatattgggccacgtccgattgaccaacatattaagggctttgaagccttaggcgctagcgtaaaaaatgaaaatgatcaaattataattactgcaccagaagatggtttgcatggagcaaaaatccatttaaagatgccatcagttggggcaacgatgaatattattatggctagtgtgacggcacagggccagactataatcgaaaatgccgcaaaagaaccggaaattattgatttagctaccttcttgaacaatatgggggcagttattcgtggtgctggtactgactctattcgaattgaaggggtggagcagcttaaagcacagattcctcatacgattattccagacagaattgaagcagggacttatgttgctttagctgcctgtattggtaatggcattcgcattcataatattatcgaagaacaccttgattcatacctggctaaagttgaagaaatgggtgtagtaatcgattcagatgaagattctttgtatgtttacccagcgggcgacctaaaaatggtccaggtgaagacagatgtttatcctggttttgcgacagatttacagcaaccaattacaccacttttattaactgctaaaagcggtgaaggtgtagtaatcgataatatttatcctaaacggattggtcatattgctcagttgcaaaagatgggagccaatattaaagttgaagataatattattttggcccatccaactaagcagtttcatggtgcggaagtaactgcaggtgagattcgagcaggtgcctgtctgatgattgcaggcctgatggctgatggtacaacaacgatcgacaaggctggtaatatcttgcgtggttatgatcgggtccaagaaaagctgcgtcaacttggagctgatgtaactatcaaggatgatcctgctgtaccgggtattttagataatatttagtaaataaaaaccacatggaaaatctccgtgtggtttttgtaatgatatgtcgatttgtaggtgaacaaatgagtttaatttttacaagacgtgcacaaaattcagatgtggataaaattgtgcaaattttaaatgatgcgacttcttttttaaaggaaagtggctcatcgcagtggcaaagtggctaccctaatcgagcaactgtagaagatgatattaaaaatgggtgtgcttgggtattaactgtggataatgaagttgcaggttatgcggcagtggtaattggccgtgagccaacttatgcggatattgaaggcaagtgggaaaataatgtggacacctatgcgacaattcaccgcattgcagtttctagtaagtttagaggaatgcatttgagtcaatttttcttgagcaatattatttctctaacttatgcacaaggaattcacaattttagaattgatacaagccggaaaaataaaattgtccagcacattgcagttagtcataattttattgaacgagggattattcaagtaactgaagatccggttgattcaagtagaatagcttacgagttgaatttaaggtaatgaaaaaccacatgggatgtgaattccatgtggattatttttttgctttatttattaatcaagcaagtcgtatttcaaagtcattaaaccatgaccttcgtcaaccatttgaccaagcagttcaacagtgttgttataaactgtatcagacatcttttgattagcagcaattaacttgtcttgtaattccttacctgaaaggttctttgcttctttgtcagtatcatgttggatcttgtgacattgtgctaaactcttttgttcaaaggcgtcttcaagttcaccgtaaacacggtagttggtatcgcctaattgagcagttaacttgttaagccagaaaatcttgctcaagttaaacttaggagtggtttgccaagcttcaggggtagtagtgatattagtatagaatggcaccattgagttaaaggtgttaggaccaaaggctaaccattgtacacctgcaatttctgcaggaacatcattacgaatttgcaaaatatgggtttcaaagtttctgttaataccgataggacggaaggtcttcttttgttcaggagtaccttgatcgccataagcatcgtaaggagtgtcttggtagtgtgagctttcggcccatttaatatcttcaattgagattaaacgattagcatggcagataaaaggttgatcttgatctgctggagtaccaccaaagtctggatcgaaatagttgtgaatataccaagcacgaggattattgtagtgagcatccttaatagttgaagaaccaaagatgtggcgcatgttgtagccttcacggtctggattcaagtgatattcttcgattaaatcctttaggtctgctgaacaagcaaaattatcagaatcgttgaagtcgaaagtatcaatattcaaacggtttggtgcaataacatatgcatcatctgggatacggcgtgcaatccaatgatgaccaccgatagtttcaaggtaccaaatgttatccttatcagaaaaggccataccgttcatttcataagtaccgtatttttcaactaaatagccgacacgtttaacaccgtcaaaagctgagtgcaagtatggtaaagtcaaagtgacgaaatcttcttcaccaagaccaccttcacttggatcaagtaatgggtcaacaccttggatgcgtgaattagtagtgatggtttcagtagcggtcatggctacattttcagcgttaattccagctgcgccccaaataccatttttgcctgaaacatcaggtgctgaagtatagcgtaatggtgtttctgctaaatcagcgtcgtcaatcttttgtttagaaattacactagtgtagtgcttaggttggtcagctgggttaacagctttaaagccttcagggatgatgacgcgaccaccgtcttcactacgagcgatcatcgtagagccatcaatagttgcttttttaccaactaaaatagtagtacattctgtttgtttcattggatcattcctttacttttattatgtttaaattatttcctaataatattgtatgcaaaaataatccgataaggcaaagaatataattaatttccccgaaaggcatttggactaacaccgctatagcgtttaaatgccttggagaaggtaaattcatcgccgtagccgactttttgagcaacttgccttagattgtgcttggtattaattaattcttttttagcggcttccatgcgcaattgcatgaggtacttttgcggcgataatttagtgttttttctgaacaaagcatataaaaagctgcgtgatactcctagcctatgacaaagttcaacaatattgcaggtaggatcggtataattttgattaagataattaatagcgatttgatattgatcatttttaggtgttttgcggactggtggatggttaggaaagtcttttactagatgataaaaaagttgataagttaaagctgaaatttttaaattgtttaataaggtctttttcttcgccaaacattgataaaggtcatctagggtttgataaaaggcagttttttgaatttgacgcaagaaatttttattaggtaaatttgatgccttgatgctttcattaacgccgttgccagctaggccaatccagaagtattcccagggttcattgtggtcagcttgaaaggaacaagtttgactgcgtggaacgtaaaaaagatcgccagcttttaatttaactgcgtggtgtctactagaagtaaaggtaccagttccgctaataatgtaataaaaaatatcgtttttacgaagattgtcaccttgaaagaattcatcgggctgacatttttgtcgaccataaaacatgatgtagctatcaagattttggttatttaagttaggcatagacttcctcactgttgaaaaattatgttacttctattatagaagagattttgcttaaaaggtgaagaatgaaaaacgaccacattaagcggtcgttcgtgaatatttatagaaaattatgatatggaattatgaaatgaaaaggtattttacttattggcaccacttcttccattgaataaaagattaagcagagttgcacagatgctggctacgacgataccgttgcctaagaacaattgaatggtttgggggagagtttggaagatttgaggatagacagtaacgcccaatcccatcccgattgaaatggcgacaattagaatattgcggttgttctcaaaatcaactttggttaacattttgattccttgcacggcaatcattgtgaacatgaccaacatggctccgcctaaaactgagtcaggaatgatggtaactagagcaccgattttaggaagtaagcccatggccattaataagccagcagcccagtaaatcggacgcttagtcttaatgccggataattgaagcaagccgacattttgagaaaaagtagtgtaagggaaggtgttgaaaagcccgccgaagatttgtgctaatccttctgcacgataaccttttttgaggtcttcttcggtgatatcttgatgaagtaggtcgccaatggcaaagaagacgccagtggattcgaccaaggaaactaaggcaatgatgatcatggtcaaacaagatgaccattcgaattctggcaccccgaagtagaaaaattgaggcaaatggaaccaagaagcttcggcaactggctttaatgaaacaagtcccatgcagctagcgattagagtaccaacaattaatccaattaaaacggaaatggaacgtaagaatcctttagcccagacttcaatgacaacgatgatgaggatggtgataaaggcagcaataagatttttcgcatcaccaaagtccttggcttgggcatttccgccacccatgttttgaaaggccacgggaatcaaagttagtccaataactgtaattaaggtcccagtaactactggcgggaagagttttttgatttttgaaaaccatccggcaattaagaaaacaaagattccagcaacgataatggcaccatacatcgtgttaattgaaaacttctgcccgatcatttctaagggagctaccgcttgaattgcacagcccaaaacgactggcaagccaatgccgaaatatttattacggaatagttgaattaaagtggctaaaccacacatgaagatatcaatcgaaactaggtaagtcatctgtgtgctattgaagtgtagtgccgtaccaattaaaaggggaacggcaactgcaccggagtacattgccagcaaatgctgcaaacctaggacagcagcttttttgtgactaacttctttttgtgccatttttaattattcttctccctcgaagtgtacttgatcattttcaaagctatcgatttttgctagggcttcaaagcgtaagccttcgttttctacccattcgcttccgccttggaaggtttttgcaacaacagcaccaactccaacaatgtcgcagccggcttgtttagcaatgttaaccatgcctttgactgcttcaccgtgggcaacgaagtcatcgatgattaagatatgttcgcctgggtgcaaaaatttctcttcaacgcagatcttattgttgaccttcttggtgtaagaaaagacgtcagcccaataaactgcatcattcaaagtagacggctttttctttctggcaaagatcattggcacgtgcagttggtaggctgccatgacaccaggagcaatcccggacgcttcacaagttaagaccttatcgactttttcatctttaaaaaggcgggcaaattcttcaccaacatgcatcattagttgcggatcaacttggtgattcaaaaatgaattaattttaagcacatttccaggtaaaacttcaccatcttgtttaattcgatctactaattccttcaatattattctcctcaagaaagaaataaggacttcttctacctaaaacaggtaaaagaagtccttaagattattcttaactttcattcacctatagtccggtatttacggtaccgggtagagactgtcgaccttatttcgacgatatatagatatttgtgttggcttaatcttaacagaatatattgccgaacacaagtggaaaattaaggattaatgttcgattatagtaaaaattattcagctgcgatatcgttatggcacagactgatgatcttttcgataatgccatataagatccccgcgattggccagatgatccagctgcgttcccaatcattggtaatgaagctatatcctagataaagtaagactgctattaaccaatagagtgtggcgtatttgttcataatcttgcgacagccggttaattggattgttaaattgcccaggtcaagcataatagctagggcagtagaaaagcaaaggatggctggactgcgaataattaaactaatggctaaagcgcgaaggctggcacttttttgagcagctgttaagtagccttgctcttgttgatcagataaaattggcaattcttcagttaagttattatctttgtggtttaattcaaaagaaggtgagccgcttttgagtaaataatcggtggtcactccaaataattctgataaagctacaattttttcaatatcgggaattgattgttcactttcccatttggatacagcttgccgactgacattcatcttttcagctagtgcttcttgaaaaagatgatttttcttgtgtaatgccgcaattttttgacctaatctcatgattgatcgtcctttcgttttgaaataatttgatttaacgaaaatttgcggttgcagaccaccactttttaattgcatttagcgcaactagtagttgcaactgctggttgctcaagataaaagccgaacaatgaatggctatttttaactttttgattgacctttttaatttttcctagtagagttagttaaaaatgcgtaattgaaaagagggagtaaatagtggctaagaatctagacgattttgataaaattattgtgcttgacttcggtagtcaatataaccaattaattacccgccgtattcgtgacttcggcatctattctgaacttttaccacacgatctttccatggagaagattaaacagatcaatcctaagggaatcattttctcaggtggtcctaacagtgtttacgataatggtgcattaaaggttgatcctgcaatctttaagttggatattccaattttgggtatttgttacgggatgcaattaatgtctcatgacttaggcggtaaagttgaacaagctgaaaacaaggaatatggccgcgccaacattacggttgaagatccagacagtattttgttcaatggcttgccttcaaagcaatacgtttggatgagtcacggtgatttggtaactcaagctccaaagggcttcgaagtaactgcctcaagcaaaaactgtccaattgctgcaattgctaatccagataaaaagttttatggcattcaattccacgcagaagtgcgcaattcagaatacggtttagacatcttgaagcactttgcttttgaggtttgtggtgctgaggctaactggaccatgaacgacttcatcgacatgaaggttgatgatattcgtaaggaagttggcgacaagaaagtcatcttaggtctttcgggtggtgtagattctagcgttactgctactcttttacacaaagcaatcggcgatcaattaactgcaatttttgttgatcacggaatgctgcgtaaagacgaaggcaatcaagtaatgcaagccttgaacaaggatcttggtgttaacatcattcgggttaatgcccaaaagagattcttagacaagttgaaaggtgtaactgatcctgaaaagaagcgtaagattatcggtaaggaattcatcgaggtctttaacgaagaagctaagaagttaaaggatgtagatttcttagctcaaggtacgctttatactgatgttatcgagtcaggtaccaacactgcccaaacgattaagtcccatcacaacgttggtggtcttcctaaggacatgcatttcaagctgattgaaccactgcgtaagttgttcaaggacgaagtacgtgaacttggtgaaaagctgggcattccacatgacttagtatggcgtcagccattcccaggccctggtcttggtatccgtgttcttggtgaagtgactgaagacaagcttaagattgtgcgtgattctgatgcgattttacgagaagaaatcaagaaggcaggtttacaagaaaagatctggcaatacttcactgttcttccaggtattcgctccgttggagtaatgggcgatggacgtacttatgactatacgattggtattcgtgccgtaacctcaattgatgggatgactgcagattttgcccaaattccatgggatgtacttggtcacatttcagatagaatcgtcaatgaagtagataacgttaaccgcgtagtttacgatgtgacgagtaagccaccttcaactattgagtgggaataatttcgtaccttaataagaagaggaaatcccaatatgacggcatttgaatagggtcaatattagtggaaagtaccggttgaaagcaagttgtctaccgtttttctaccggtagaagttgattttaatcagcatgaatagtgcattaaacgctactattacctgttcgttattttggggttgtctaccgaaaattgaatattttgcttacttttgttgaaaagtaagtgactgttgtcctacttattgtcatttgataagtggggcattttttttctctttgttgccacaaaagaaatgctgaaatccaaacggagcagtctgtttgatcgttgttgttacttatgacgaaaacataagtaaatcagatatgaaatctcgaaatgaccttgaatgaaatctcaaggtactcattctcgaatgcaatatctgatcggtcgcaaccgaaggctgaaaatttattttgccgggacggcaaacatgagggggtcattgcacgatgaagccgttaaaggatgagctaattcaaagtcgacttgatgaagatgaattagcagattttgataaagtgaagaaactgctcgatgtgaagagtaattctgttgcaattcggcagatgattaaagatgaaatgagaaagccagaaatgaatggaagcaaggtaatactgacgttgtatcagcgttattaaccaagctgtctgctgaaggtcgcctaccattgtcagaggcgttgatgggtattacaggtactaaaacatcatcacaattgagtatcttacaaaatcagttcgccgatattcaatcacagttagaaagtattatgtattcagtgacaaaaatggtcgattgaacaagtggctcatgtagttagaatcgcctacaagaccatctacaactggattgagcaaggagtattggatattggcgtggctgatttacctgaccatggaattcgccgccgacgagccaaagaaacccgtgggacttttagccatggacgttccattgaagatcgtcccgctgaagttattgaccgtcatacctcaggtcactttgaagcagatacagttttatctggaaagcgtaaaggtcaagcaatagctacgtttgtcgagcgtaagagtcgtcttatcatcgttaaacggcttcagggacgagatagtacctcaataaccaaggccattttagaattagctaaccagttagaagataatctcaagccccttactgttgaccatgggaaagaattcgctaactacaagctaattgaaaagcaggccaggattcccctatactttgcgcatgcttattctccacatgaatggggcagtaatgagaatcgcaaccgagtactacgacgctttatcccaaaggtcaaccgattgagaaaatcactgatgatgagttaattcaaattaactggtatttgaactccaggccactcaaatgtttaaactggcgcacactaattgagatctttttgcgtaatctgcgtcactaactttgttcaagttatttcttgcaatctgccgtttgaaaagagattagccttggcggttagtctcttttactatctggtaagttgactgcaaacagaaaaaagagccaagccgtcatcaaagtcgctaaaccgtgctataatgttgtcggatttaaaaataccactagttattaaatttgggaggcaaaaataacgatgaagcaacttaaatttttagaaactaagcggacaccgcgttatagtttgcgtaagtttagcgttggtgtggcttcggtattattaggagtaaccatttttggaattaactttacaaatcattctgtaaaggcagcaaccatagaaagcgttaaaacttccaatagttcaccagagacgcaaggtagtgcaagtaacaatgcaacagctaataattctacagaagctgcgacaaccccacaatcttcaccagaaacgcaaggtagtgcaagtaacaatgcaacggctaataattctacagaagctgcgacaacctcacaatctttaccaaagacgcaaggtagcgctcacacttatattagatcattagcagcaagatcagcagcaagattagcagctacgaattttatggtaacttctggttctgacagaaatgcagcaggtacagtagatcaaaataacattaatactcagctagctaaagaaaatcaagaattggccaataaggctaatctaacttcttcagataactacagttctaatatctataaaggtacagatggaaattattacaagattgtaactatttatggtcaggactacgtttaccgtgctgctgatattcaagctagtggtgctgattttaagggggatcctaaacaaacagctgaagatactaaaaataatatcaatatttctaaagaagatttaggaaatggtaagacccgttggaaggttgttttcttccctaataagggattacaaaatgttggcagtaaattaagtgggttaagttctgcaaaatttggtattgccctcacttctgactaccaaatcgttggtaatgttgacatgaaagtaattagtaatcctaatcaaacatttgaatcttatacatttgagcccggtagcactagcgctactgaatttccaatacaaaatctaaaaactgaaaaagacttttcatttaatcctaagacagatgttgatccaaatactggtttaattaatagtgaaaccatgccagcttataacaatcaatatttgcaaggcccatactatttcactactgctactgatgttggtgctaagaacttatggcagacttactttaaagatgctgatgaacgtaagaatgcatatgatgggtccccttatctaggtggcaatcatgactttcattttaatacttttaaaattgcaaatgaaactggagttgacggtgcaaaatataaagacccaatcatttatgacaaactggggtataggttaaattctaaaaacggtgtagctaattctaatggcgtatatagcagtgataactttaaccaagcaatgtcatttaagtcacaaggtgtcactagtaatgcacaattttcttcttatgttatttcctttactacgcaacacacagactctcatgaagtagaattaactacaggttcgaaaaatcaacaattctcaggaatcgcagctaatatttattcttatcagaattggtactatagcatgatgtctagcttatatggtgagcagagagcactggatccagctggtgcaccaaaaacacctaaagatgttatttctggttgggttgatgccactagagctctggatgagattaagaaagactatttaaataatgctcaaattaatgttttgcggaataaaattctaaataacattacagactctgatgctgtaaataacattattaaagaaggaaattccttaaacgatgctatgaaaaatcttggtaatagtatcggacagtatgatcctgatggcagttttgctgatcacaaggaagatacaacaaagaaatctgatcgctataaatacgcaagtccagataaaaaggcagcttatgacaatgcaactgaagtaactaaagctttgattaacaaagatacaggtacctatgcagatcaagcgacggtagaacagcttactaaagatgaaaatgatgcttggaacgaacttaatggtgtcaagccaaaggataatgaggttaactctccggtcggtggtaccattactattgaaaagggacatgcattagattcaactgatgccgctaatgcaattaccaataaggatagtttgactaatgtaaaaagttattcttggtcgggtactccagatacaagtaagccaggatctattagtccaaaagtaatagttacatataatgatgatagtgctgatgaagtacctgtaactgttaaaataaaaggcgatgctgacaagtacaagagactgtaaaatagtttgtgtaaggatgaatgattccttaaatttatttctttaaacattagaaaaaggagttcctttctcgtatgattggtttgaacaaaaaaaacacatacagaaagaagaactccttcatgaatgattttaccaaagattttgctcaagctctattcaatccagacaaaataaatgatttattgcgcaaagagctacaacaggctgttaataacttgctagaagctgaattgactgcctttctaagctatgatccctatgccagaaatggctggaatactggcaattctagaaatggtgcttatttccgcaaggttgatacgcagtttggaccaattgaagtgcaagtgcctcgagaccgcaacggtcagtttcatcagcacacgctgcctgactacaagcagcactcggatatcttggaaagcatgattatcaagctttactccaagggcgtgaccaccagggacatagccgatctaattgaaaagatgtatggcagccattacagtccagctcaggtatcaaatatttccaagcagatgattccaaaggttgaggcttaccacaaacgcaagctaagcgacaagtttttctgcgtctatttggatgcgacataccttcctttgcgccgagaaacatttgagcgtgaagcagtctatattgccattggcatcaagcctaatgggcacaaggaggtcattgactactgcattgcacctagcgagaacattgaagtctggacagatatgcttcaaaacatgaaatcccgaggcttaaagcaagttgagctttttctttctgatggtgttgttggcatgaaaacagccttggccaggacttatcctaaagctcattttcaacgctgtttggttcatgtcatgcgcaatatctgcgctaaagtacgcgtcgacgatcgtgaaaagatcatgaacgaattcaaacaggtgcatcaacagacaaacaaagaagaagccacagctgtcctgcatgacttctataccaaatggggcaaggtttacagccatgttatcagaagcttgaaagacatagaaccagatctgctggtcttttataactatcccaagcagatcagagcttcaatttattcgactaacatgattgaatcatttaacaatgtgatcaagcgcaaagctaagcctaaggcagagtttccaactgaacagtcgcttgatgcttttattggcattcaggcaatgagctacaatgaccgttatttcaatcgaattcataaaggctttggtcaggttcaggacaccttagaatcctactttgattaaataaataattaaaaaatcaatttacgagaaagaactatttacacaaaagatttgacagtttcggaaaaaatcctaatgaagaaacttaatatattttattatgctaccatttggagttttattattggaatatgctgtgctacatatttaaacttaattaattttattattaattttgtctggcatgttttgtttgataaattacctgttcctagtcaggctttaccgttttttatttgtattccttttggtttcattattggtatattaattaagcgtttaggatcatatccattaactatcgaagaagttttaatgagtgttaagcaggagggaaagatcaattatcacaattggtggaaatccttaaccttaggtcttatttctttagccgcgggtggcagtattggaccagaggcttcaactactgtactaggaagtggcatggttaattggctgggagatagattacgactaattgcttattcttctgattggaaatggaatcatttttgggatactatcgtttcgaaaaaacaactaaaaaaactgccaaaatttagtagcctttttaaatcaaaattgtatcaaaaagttttttgcttaattatggttatgatcggcgtggttggtgcagcaatagtctttaaattattccctgaagaaggattatttggtattcatcatcgccatattctctggcaatggcgctatagtatgtatgtaattattctattaattgtaggttggagcttcggtatgtttttcttatggagcgaaaaatggagtgattattttgctaaaaaaattactatttcaccgattattaaagcaactatatggggaatagttcttgcattacttaccttaattactagttatgccctgtattctggtgaatttcaaattgttccatttgtacaccaggcgttgcaaatctcaccattatttttgctagttatagcagtcatcaaaaccttgtctactaatataggttttagtttaggctggcgtggtggaaaaattttcccttcgatttttgctagtgtagcagttggcgcagcgattgcgcaatttttaccaattatgccagttatgtgtgtagccattacagttagtgcaagtattgcagttatcttgggtaaacctttattaacagctattttattgattctgttattaccaatagagttggctcctgtcattttagtaagtgcgtatttatctgcctgtttgacaaaagtgagctatagttttagacaaaagaataattagggaggtatttttatgaacgaaaaaaacgatgcagtaactggtgcttctttgatagagaatcaagaagaaaaagtaaaaagcccatggccgggtcctaaaggtatgattcctgtaacaagtgggcgtgctgacgatgctaatgtacataatcgtgcctacttagacaatatcttggtggagatgcgtttgcttgattcagttgagccagacttaacaactgagatttttggtaaaaaatatgcctcacctttaactctggctgcagtctctcatttgaacagggttttaccagataagacgcgtaagccaatgcaagaaaaggcacgtgcggctaagaataccaatactttaaattggattggcatggagtcaaacgaagaatatgccgaaattgtcaaagagggcggcgatacagttagaattgtgaagccttacgcagaccatgataaaattatgggcgaactaaaacaagcagaagaattaggtgccgtagctgttggaatggatattgatcatgtgcctggtgataatggtaaatatgatgtagtcgatggtattccactaggaccgatttcatttagcgatcttgaaaagtatgttcatgcagttaaactgccgtttgtggctaagggcgtgctatccgtgcgtgatgccgttaaggctagagatgctggtgccaaggcaatagttgtttcacatcaccacggccgcgttccatttggcgtgccgccactaaaagttttgccagcaatcaagcaagcactaaatggcagtggaatgaccatttttgtagatggatcattgatgactggctacgatgcatacaaggctttggccttaggcgcagatgctgtactgattggtcgcgggattctttctgaattgttaaaagacgggcaaaaagcaacagaagataagattaagaaaatgaatgagcagcttgcacaaatgatgttatatactggcgttaaagatactaagtcatttgatcctagtgtgttacattttgattaggatagaaaaatgaaatagtttattttttacagtttactataattaagtggctattagcctataataaaggcgtttaaagctatactgaatagtgttatgcttaactcggacgttgttataaggtaattatttaaaagtaattagttgtatacgaaaacatgcttagctatggtaaaagctaagcatgatgtctcataatattgagccgcttgtagattatactacaagcggttttattttagatgaaaataacaagttttcaaaaagtgagtatctatgttttgctattatggaaatggattgatttagaaaatgatgctattgaaatttcattatgagcggggatgcaaaaccttttttaaaaagcataagaatgagcaaaagataattaagcagttaatcgatcaagcgattactaaggaattggcaactggtatgactaaagtgaagatcgctgcaatgactcggattaagggaaaatcaatttacgagtttcgcctaaatttgaaaaaagcgggttcagcgagagtcgcttttgcagtaaaggatgagcaagtactagttcttttgattacctctaatttacagaaggatagttttagtcatgaattagaaactgttctgaaaggaagtcattatgcgtttaattccaattaagcaggcagagactttgctcaaaaaaatgtgtagtaataaaagtaaatatgtagaaattaaattattaacggcaaaaaaggatcgttcaattagtgtgaaaaatgatggtaaaaagctaattttaactgaagatggctatttgaactttacgcaggaatatgaattgactgatccagctgttggccgtcatgcagttttagcggcttttaaaaaggaatttccgcgtagtaatcgtgcatatctgattgctaaatagtatactttaactataagaaaaactatcagtgttgattagaaaggaagtctttttatcaatgaaatatgcagaaaaatctcccgcattatgggatgccattcatcatgaagaacagcgccaacaagacaccatcgaattaattgcctctgaaaatattgtttctgatgcagttcgtgaagcacaaggttctgttttaactaacaagtatgctgaaggatatcctggtcggcgttattacggcggttgtcaatatattgatcaagttgagcaactggctattgattatgcaaaaaaattgtttaacgcaaagtttgctaatgtgcagccacactctggatcacaggctaacatggcagtttatcaagcacttttgaagccaggtgatgtcattttaggtatgggcatggatgctggcggtcacttgactcatggatccaaggttaacttcagtggtaaggaatataagtcttacagttacggcctaaatgttgagactgaagaactagattttgatgccattcgtgaaattgctcttaaggttaaacctaagttaattgtagccggtgcttctgcgtacagccgcatcattgattggcaaaagttccgtgaaattgcagatgaagttggggcatacttaatggttgatatggctcatattgctggcttagtagcaaccggtcaacatccaagtcctgttccagtagctgatgtagtaactacaactacacataagaccttgcgtggccctcgtggtgggatgattttgtccaacaatttagaaattggtaagaaaatcaattccgctttgttcccaggcattcaaggtgggccacttgagcatgtcatcgcaggtaaagcgcaagcattttatgaggacttgcaaccacaatttacagattatattaagcaagtcattaaaaatgctaaggcaatggcagaaacttttgctgaatcggacaatattcgtgtcgtatctggtggtactgataaccatttgatgattatcgatattactaagactggtattaccggtaaagatgctcaaaatttactcgactctgttcacatcactaccaacaaagaatcaattccaggcgatcaacgttcaccatttgttactagtgggttgcggattggtacgccagtaattactagtcgtggctttgatgaagcagatgctaagaagactgcggaaatgattattgaaattttatctgatccagaaaatcccgcaacgattgcccacgttaaagaagaagttcaggcattaactaaaaaacatccaattgaataatttgtgtagcagaatttagccgtcctagttctcagctggggcggcttttgttataataaaaaattaaaaataatggagttaagagtgaaggaaacgtgattatttggaaaagttaaaaagacataaaataggcttattttcagcgattatgctggccttgaattctttaattggttcgggctggctttttggttcaggttctgcagcacaaattgcaggtccagccgcaattttatcttggattttaggtgcagtaattatcatctcaattgcattgacttatgtagaattaggttcgatgtttcccgaaagtggcgggatgagtcgatacgctcaatatagtcatgggccgttattgggctttgtggctgcttgggctaactggatttcactagtcacattggtaccgatggaagccgtagctgccgtgcaatatatgagttcttggccctggagctgggctaactggactaaaaattttattaaaaacggcagtattacttttgctggcttaggtgtggttattatttttatgctgatttttacaatgatcaattttgggtcagttaaaatcatgacccattttaccaatttgatttctatttttaagatcttattgcctactttgacgattacagttttaattgcttcaggttttcatggacaaaactttggcagtaatttacatgaatttatgccttatggtagtcggtccatttttgaagcaacttctgtttcaggaattattatgtcttatgatgcctttcagacggtcatcaatatgggtggggaattgaaaaatccgcgtaagaatattgtgcgtggggtattgatctcaatgttaattactgcggcaatctacattatgttgcaagtgacgtttattggtgcagttgagccaggcatgttagctaaagtaggctggcatgggatcaactttacctcaccatttgcggacattgctattattttaggcattaattggctagtgattttgctctacctagatgcatttgtttcaccatttgggacaggggtagcatttgtagctacggcctcaagagccctagcggcaatgacacacacacgtcatttgccaaaatggttaggtagattgaatcaaaaatacttaataccacgttatgcgatgattgctgactttgttttggcggttattttagtaagcttatttagaaactggaatttactagcaacagtaatcacggcctcaactttgattgcatatttgactggtccagttacggtaatgactctaagaaagaaaagaccagatcttgatcgtccatttaatcctggttatatgaagtggctagctccagttacctttatactaactagtttggcaatttactggtcaatgtggccaacgactattcaggtgataattgttattgccttgggtttgccgatttatttttattatgaaattcactaccaacattcaaatttaaaagaacaattacatagtagttggtggatgatcggttatttgatttttatgtcacttatgtcctttgtgggcagtagcggttttggtggtcagaactggattaagtatccatttgactttgtagtaattatcattatttctctcgccttctattattggggaattaagacagggttaaagaaaatcgatccttatgctgaaaaaattgcgcaaaataaagaataagtaaaaaaactgttgggatttttagtctcaacagttttttgttcgctattctgcttcatcaagatacttatttagcaccttgaaaacaccgttgtcgttattagtaggtgcaataaatttagcagtctttttaacgatatcttgaccattagccatggcataacttaaaccagcaaatttcaacatttcaaggtcattttcaccatcaccgaaggcaattaattcacttcttggcacgtctaaataagctaaaaattcctttagccctgcggctttatttacaccttcaggaataatatccatgtagctccaaccactagttgtgacgtggattttttctgtactacggctgttgaagccatgttctaattcatgtcgaatcttgctgggatagtccattgtgatcttagtgtattggtcatcagcaggaattttattaaaatcatcaatttcgatgctattaggataaaaataatgatgggaccgcttgtattctggtggtgtactttttaaaaagtaggagtgcttaacgccactaattaaaatgttttgggctgcaccaggatagcgtgcgtgcaaatattcaataaaatttaggatgcatttttttgaaaagcttgttgtacgaataatttttccatcgcgaactaagaccgcaccattgtcggcaacaaagtcaatagaatcgataaattcgctaaagtcatcagccaaacgaccagctgggcggccgctagcaataataaaatgtgccccgtgttgatgcagacgagttaaaatctcgctaaacatttgatgatcgtattgtttttcatcgttaacaaaagtaccgtcaacgtctacagcaacggccttaaagggaagagtagtcatctaattacctcactaaaatttgataccgttaacagtttaccatttcttgcaagtgcttacataaattatttatattatgtttaacaataaatttgaaatttacgaggtagaaaaaatgacaccatggtggaaaaaagcagttgtttatcaaatttatcctaagtcatttcaggacagcaacggtgatggcataggtgacttacaaggaattattgctcgtttagattatttggaaaatctaggagttgatgcaatttggctttcaccggtctatcaatctcccggtgtggataatggctatgatatttcaaattatgaagcgattgatccgcaatatggcacgatggctgatatggatgagttgattcagaaagctaaggagcatcatatccgaattgtaatggatctggtggttaatcatacatctgaccagcatcaatggtttgtggaggcacgaaaaagtaaggataatccttaccgagactattatatttggcgtgatcctgttgatggacatgagcccaatagtttgaagtctgctttttctggttcagcttggaaatttgatgagcaaacaggacaatattatttacacttctttgcggaacaacaacctgatttaaattggaaaaatccagagttgcggcaaaaaatctacgatatgatgaacttttggcttgataaggggatcggtggcttccgaatggatgtgattgaattaattggtaaagatcccgacaaaatgatccgtgaaaatggtccgatgcttcatctatatttgcaagaaatgaacaagaatacatttggtgatcgagatgtgatgacggtgggcgaaacttggaatgcgacaccgaagattgcagaagagtactcagatccagcacgtcatgaattatcaatggttttccaatttgagaatcaagctttagaccagcaggaaggaaaagaaaagtgggatttaaagccgctagacttaggcgaattgaaaaaggttttagtaaagtggcagacagagcttgattttaatcatgcttggaatagtttgttctgggaaaatcatgatattccgcgcgtaatttcacgttggggcaatgataaaaaatatcgggtgcagtgtgctaagatgtttgcgacagttttacatttgatgcacggcacaccatatatttttaacggtgaagaaattggtatgactaattgtccggtaaaaaatattgatgaagtagaagatattgaaagtgtcaatatgtatcatgaacgtctggctgaaggttatgacaaagataaactaattcatgcgatcaatgttaaaggcagggataatgctcgtcgtccaatgcaatggaatgatgagaaaaatgccggctttactaagtcaaagccatggttgacagtaaatcctaactacaaagaaattaatgtgaagaaggccttggctgatcctaattcgattttttatacttaccaagaattgattactttacgtcatgaaaatgagattgtggttaatggtgactttaagttggttcatgatactggtgatgaagttcttgcatattatcgtattttaggtactgaaaagtggttggtggttgctaacctatctggtgaagagcaacagtttacgtcgaccgatcgcattaaagaaaacttgcttagtaattatgctgtgcgtaatgatctgcatgatattacgcttaagccttatgaagcatttgcagtggcaattaaataagctaaaattaaaaagaacttgaattactaacttgaagatgttattctagttatcgttaatcgattaatctatgatctgtgatatgatcatggcaaaggagtaataaattatgaaacaaggtattcatccagaatttcaagaagtagttttcatggactcagcaactggtgctaagttcttagctggctcaactttgaagccatcagaaactattgactacgaaggcgaaacttacccattagtacgtgttgaagtttcatcagattcacacccattctacactggcaagcaaaagtttgctcaagcagatggtcgaatcgaaaagttcaacaagaagtacggtttgaagaagtaaaccttttatctggtggaagcagtcccattggggctgcttttttcgttagagattatttggcagaatgcatgaaagacagtataatgttttctgtataaaaatgtttttatgggagtaaatattcaatgaaaatgcaaatggcggaaattgccaaggctttaaatactacttgtgaaggtgacaatcaaactgttattacttctgttgcctttgactccagaaagatcacagatggtggattatttgtaccacttgaaggtgaacgtgatgggcacgaattcatagctagtgctattaataatggtgcttctgctactttatggaaaaaggggcatccgaacaagtcagaagatattgcggttattgaagttgatgatccacttgctgctatgcaagagcttgctcgctattatttgcgtaaggttaatccaaccgtagtgggaattactggttcaaatggtaagactactaccaaggatatgattgctgctgttttgtctaaacgctttaatgtacataaaactcaggccaactttaacaatgagattggtgtgccaatgaccattcttgagatgaagccaaatactgaaattttggtgcttgaaatgggaatggacagaccaggtcaattgcatcatttaagtgaattaacccatccagatgtggccgtaattacaatgattggtgaagctcatattgaattctttggcagccgcgacaagattgcagatgctaagatggaaattactgactttttgcgtgaagatggcgaatttatcttcaatggggatgaaccattattgcaagaacgtgctgagaaattggatcaagctaaagcaacttttggttttagagatgaagatacagttcatgcaactggctttaagagttatatgcatcatgctacctttacagttaatgattcagagcaaaaattctcaatcccaatgattggtaaacacaatgtttctaacgcaatggccgcaattagtgttggtcgtcattttggtgaaagtgatgaggaaattgcctcatcattgtctaactttaccccaacggctaatcggatggagtgggaaaaaggcgatgctggcgaaagcatcatgagtgatatctataactcaaatccaactgctgttagagctgtattgactagttttggccaagttgaagtaaaagatggtggtcgtagaattgctgttttaggtgatatgcttgaattaggtaaaaagtcgccggaattgcatgctggtcttgcagatacaatggatccccagattattaacgaagtttacttatatggctctgaaatgaagaatttatatgatgctttacaaggcaaatatgagccagaacatttgcattattatacacaagaacaaacagatcgaatgattgatgatctgaagaacgatattaagtcggatgacattgtagtattgaaaggttcgcatggaatgcacctagaaaatgtcttagcccgactgagataggagaaaaatttttttgaaattttcagaattaggattaaatgatgcgcttcttaaagcgattaaacgttcaggctttgaagaagcaactccaatccaagaacaaactattccccttgctttgcaaggcaaagatgtaattggtcaggcccagactggtaccggtaagacagctgcgtttggcttgccaattttacagatgatcgacaaaaaagaaaaagcaattcaagcggttattattgaaccaacgcgtgaacttgctattcagacgcaagaagaattattccgtttaggtcgtgacgaacatgctcatgttcaagtggtctatggtggagctgatatcggtcgtcaaattcgctcattgaaacaccatgtaccatcaattttagttggtacgccagggcgtttgcttgaccacttgaaacgcaaaactattaatttagatcaagttaaggctgtcgttctagatgaagcagatgaaatgctcgatatgggttttattcaagatatcgaaagtattttgaaatatgctaagaaccgacaacagacattactctttagtgctacaatgcctaagccaattttgcggataggcgaaaaatttatggatcacccagaaattgtccgcattaaagctaaggaattaactgctgatttgattgaacaatattttgttcgtgctaaagagtctgaaaaatttgatattatgtgtcgactaattgacgtgcagggtccagatttggctttagtctttggtcgcaccaaacgtcgcgtagatgaacttacgcgcggtttgcaagcgcgtggctacaatgcggcggaaattcacggtgatctatcgcaagcgcgtagaatgtcagttttgaaaagatttcgtgaaggtaagctagatattctggttgctactgatgtagctgcccgcggacttgatatttcaggcgtaacccacgtttataattatgatattccccaagatccggattcatatgttcaccgtattggtagaactggtcgtgcggggcaaaatggaatctctgttacttttgttacgccaaacgagattggctatatgagaaccattgagcaattgactaaaaagaagatgtcgccgcttcgtccgccaacagatgatcaggcattacatggtcaattaaagcaagcaaaaattgaaattgaagatttgatgaacggtgatttgggtaaatatacccaaggggcaagtgagctgctggataactattcagctctcgacttagttgcagcctttttaaagaacttggctaaagatgaggttaaagtcaagattaccccagaaaagccgttaccatacaagggtgatggtcgccgccgtcgtggtaaaggtcatggccgtagcaataataatcatggacgcgataaccaccgccgtcgtagtaacaataattcataccgccaaaatggaaaccgcggtaagcgtggtcgtggcaacggacatgaatttgtaatcaagaataagaaagattaggattttacccggatttaaaattgaagtgcaacactaagtgttaaacaaaaaggccatgaagacctaaacttgaagtgacgaaaaatcaagaaaggaagatcttcatgaccaattcaaattctagcatttctaagcactatcatcaattaaccagcgtacaacgtggacaaattcaagcaatgctggattccggcataacttcccgtactgttatcgctcaagaagttggctgccataagtcgacaatcagtcgcgaaatcaaacgcggaagcgtcctgcaaagagacagcagctatttattgtatgagcactattacgctgatactgcacagatttattatgagaagcgtcgcaaaaactgctatcagcgcaatccattgaagcattatgctgtctttttgagaatgctctccagacgctttaaagctaaatttgatgccaccagcatcgatgagttcgttggtgaattcaaaaggactatgccaggctacccttgtcccagcacaccaaccgtctatcgctatattgatcagggcttgctggacataagcaatattgatctgcctatgaagctcaaaagacgcaggaacaagcgtcatcacagccatggcggtcacgctttgcacaagaagcatcttggcaattccattgaacagcgtcctaaagagattgaagacagaaaagctccgctgcactgggaaggagatctggttaaaggcgtcagacgcaagaatcagcctgctttaatgactttgactgaaagaaccacacgctttgaagtagttatcaagattcctgactatcgggcaagcacatgccaaaggctgcttcaaaaggagattgacagacatcctgcctggtttaaatcaatcacgtttgacaatggctctgagtttgcggatatgaccaagatcaagggctgccagatttactttgctcacccatattctccatgggaaaggggcaccaatgagaactgcaatggtcttttgcgtcaattcttccctaagggcaagagcatgaaagacaagtcaaaagcttatgttcaacaggcaactgatgccattaaccacaaatatcgccgaatcctccaatatcacacagcagaggaactcttcaagcaatatatctcttcataacctaactgttgcacttaatttgacaattcagggattaggattttatcttaaaaagggaagttgtaatttttacagcttcttttttgtattataatgatgtcattgtgtgaggtgaaaataatgattaaaggagtaggaattgactcgattgaagttgaacgagttaagaagatcgtggacaagggggatgcttttgccaaaaaagtattaactcccaaagaatttgatcaatatcaaaaaatggcaggcaaacgtaaagttgaatacctaggcggacgcttttcattaaaggaatctttttctaaagcaatgagaacgggtctgggaaagtatattggttttcaagatgtcgaaactttatgggatgatttaggtcatcccgttatgacttcaactaagtttgatggaaatattttcccaagtatcacacatgataatcatgaaattattacatttgtagttttggaggaaaaataaaaatatggttccaggctatcaccgtccagccgttgtaaaggtaaatttgggcgcaattagaagaaatataaaaaacgaaatgaaacatcttgcaacagggcaaaagatgttagctgtagttaaggccaatgcttatggtcatggtgcagttgaggtggctaaaattgcgattgaggaaggtgcagcaggcctttgtgtagctattttagatgaggccttgcaattgcgtcatgctgacattgttaagccaattttagttttgggagtagtttctccagaatacgctccaattgcggccgcaaacaatgtttcattaacgattcctaaccttgaatggctaaaggaagcagaaaagtaccttgaaaaagagcagttacagttgaaagttcatattggagtagattcaggcatgggtcggatcggctttaacgaagatgaggattttattgctgctaataaattcttacaaaataacgataatttctacgtagagggtatgttcgcacactttgcttccgcagacagtgctgatgatacttactttaagcatcaggtagaaaaatttgctcatatgagaagtttgttgacagttaagcctaagtggattcacgtagacaataccgctgccagcatctttaacaaggatgtgcctagtgattgtgttcgttttggaattggcatttatggtttgaacccatcctctaatcctgatagtcctgacttgaagtcatcaatttcgcttgaaccagcattatcatttgagagtgaactaactcatgtaaaaactattcatgaaggtgacggagtaggatatggttctacctttgtagctgatcaagatacaattattggaactgtgcctgttggctatgctgatggctttattagaaagtttcaaggctttaaagttaaagttggagacgaatactgtccaattgtcggccgaatttgtatggatcaatttatggtcaaaatgccaaagaaaatgccgttaggaactaaggtagtcatcatttccaatgatccaacagcgccaaataatattaaggccgccgcagattatgttgatactattcactatgaagtagcatgtttgttaaacgatcgtttacctcgtgtttactatgaaaaataagttaggcaataaaaaagtgtctgggaaaaaactagcttccagatgaataaaaacgatcaagatttccttttttaagaatcttgatcgtttttttgttctctttaaaatttttaacaataaaaatcggcccttcagccaccttctttgacaatatttgttcaaattcatcatcataaaggcaattccgatatcggtttcgaccttctctttacctcgcaggtgcgttctgcgcatgccaaatacgttcttcaaatgtccgaaaactggctctacatcatattttctcatgccatagatgtgtctgccttcttcgctttggagaacttcttttgctttttcttttaaatattgccagttaggattatagcgaacttggcgctggcggccgctagctgttttagccaattgttccaattctggcgttagctggaactcgtctgcctcataaaccttaaaatcacggacctgaccagtagaacgatccttgcgctggctgtaatatttgaaattgaatctgacgccatgatgatcaatgtaataatcatctttttcattgtagtaccagttgattagcttagttggatcattcttatactttttggtctgttctttttcatacatagtgtagggaataaagtacttcttgtctggatatttttcctccagcatcgaataattgtattcactgccatagccagcatcggcgacgattttgtcaaacttgtccaacacggtcatttgatccaaaaccggctccaaagttttgaaatctgtcggattaggaaagatggcataatcaactacatattgatcggtcgtgactgcttgaatattgtagccaggctttaattgaccatttttcatgtggtcttccttcatatgcataaaggtggcgtcatgatctgttttggaataactgttgcgtccggcaaagatctcttcggcttcttcatatttttgcattcttggcacataatcttttcttagccggtgcagaatcttttttagtccacgtcgcttggcttttcgaggtgaaccgccaggaatggctttgttttcctgctcaatctctttagtcagcttgttaatttctgcttcagtttcttgagctaattcctttagcccctgactagtttgaactttttctttttccatttctttgactacttctttagtaatcaattcatcataaagttcaactgcctggcctttcagcttttcatgatacttttcaaccgctttgcgccagacaaatgtatagcggttagcatcagcttcaatcttagtaccatcgataaaagcagcaccttcattgattaagccttcatcttctaacaggttagtgaagtagataaagctctttttaatcagttcattggcatggctgcttgatctaaaattattgatagtatgatatgaaatcttttgctggtcagccaagatcatcattggcagattttcttccagcatcaactcaatctttctgccagaaaaaactcttctggagtaagcaaaaagcagtattttgagcatcatggctggatgataggctgggcggcccgttttagcagtcttgcctactaaaacatcttctggaattgaatctacaaaccagctgatgacattagccaaatgattggccggaatggcaaaatctagattaagtgttaaagcagtttgacctgtgatataattcttgtacatgttagtttccacctttttgtttttattttgtgatgatttaataatatcaaggctggagctaaaagtatacaaaaagagcgttgaaacaaaaattcaacgttcttttttcatgatctgagacttagttttttcccagacactttttggtagatcagttttttaatccttaacagggtgttcaataaagacacctggattttcatcactcataatagtcatgccggcttgcaaatcttcgatttcagaaactacgaaaccttttctttgtaacttatcaacaatcgttctcatggtaatatctgagacaccagcggggagagtaaagagtgttcttctaacaaaattaccttcgagttcgccagcagctgcatcaagtgtcattacactagacatattagtgtgcttagacacaatcttggacatcttgatcaagttaccacgtgtattgtcagataaaacggtcaaaacgtatgaaccatttttaacatcccacgcatctgacaacatatcaagcattcttgagtgagtaagaataccataaaaatgattatcttcatcaaggacagcaatataaggcaagtccttaatgttgaaaaataccttgaagaatggtgaattgaccttaattgtcttagtggcattcttaagtaagtaagttactggtagattcatatcgccaccttgtgacttatgacggtagatatgcatcttataaatgttaccacggaaaatagtaccagtatcgtcaacgattggcacacatctgtagcctgaatcttctaaaacttttaaagcttctgctaatgtggctttttcattaactgttgttaaataatcttttttaataactaaagatttaataagcatgagttcgcctccgaaagtgagaaatgtttcaagtaattatagcatagttgatgagttaattaaatattaattaaagttcatctgaagtaacaactatattttaacaatagttagacaaataaaaaagcatctccgaaaaaagagatgcttttaagtgaaacaagttttagattattgacgaaccttaacgccagtttccttaaatgccttgtccataaccttcttcaattgatctgcagaagcagtcatcaattcttgttccttgtcacttaatggcatttcaatgatttgttcaagacccttacggccaacaactgcaggagtaccaatgtgaatgtcatgtaagccatattgaccgtccataggaactgaaagtggaagtacacggtgttcatcgttcaagatagccttagcgatcattgctgaagcagtaccgattccgtagaaagtagcacccttcttgttaattatttcgtaagccatgttagcaacttccttgtggatgtcttcaagcttagattcatccataccgtgagccttaacccagtcactaacctttacgccaccaacattgttgtagctccatgctgggaattcagtatcaccgtgttcaccaagcatgtaagcattaactgaacgtgggtcaacatgttccatttcaccgataaccttttgaagacgaccagtatcaagtgaagtacctgaaccgataacacgatccttagggaaacctgacattttccaagttgcgtgggttaaaatatcaactgggttagcaacaactaagaaaataccttcaaagcctgattcaacaactggttcaacgattgatgataaaatcttcaagttcttgttaacaaggtcaagacgagtttcgcctggcttttgtggagcaccagcagtgataactactaagtctgcatccttacagtcagggtagtcagctgcatagatattctttggtgaagtccaaggggtagcatcagctaagtcaattgcgtcaccttcaacgtgttccttagcgatatcaataatacccaattcttcggcgataccttgttgtaccattgagaatgcgaaggttgaacctacagcaccatcaccaacaagaataactttacgaggtctttcatctcttggcataaataaaaatctccttttttattagtgatatttttaacaaaatgaattataccatgatagcaagcattaataaaattattatttcctaattgtgctattatatgtaagattgtgtgcatagtgaggagtaaaaataatgaagataattgcaggtttaggtaatccaggacaaaaatatgataaaacaaagcataatactggtttcatgacaatggatcattatttgaatgaaaagggtttgtcactggataaagataaatttgaaggtcattggactaagcaaaaaataaatggtgaagatgtaattttgcttgagccgcaaacctttatgaatgaatcaggtcgttcagttagtcaagtggctaacttctttaaggttgatccagcagatgtgctaattattcaagatgatatggatatgccaattggtaaaattagaattagagctaatggcaaatctggtggacataatggaattaaaagcatcattcgagatttagggacggaaaagtttaatcgtttgaagattggtattcgtcatccgaaaaatgcaacggttgtttcatgggttttgacaccatttaatgatgaacaacaaaaattgatggatgatgcatttgcgataagtgtagatattattgacgactttatcagcggacatggtagtcaatatttaatgaataaatataattaaaatgcgtttaacagagattttagataaagatcaagatttaaataattttatttcaaaaacaaaacaagtaaaaaattcactaatcactggcgctaatgccggtgcttttagtctattgctaaaacagataacaactaaattagcagctccacttattttaattgaagaaaacgaaagtaaagcacaaaacttatatggtgaactcagtgccattatggcagatgaaactgtgcaaatttttccagtagatgctacaattgcaacgcaaacggcagttagttcgcctgatgaactgagcagccgaattcaggcacttaattttttgttaagtggtaaggcaggaatagtggtaacaacgccgcaggggctgcaatacaaactgaccaatccaactgattttgcgcaggcaaagcggagttttgagccaggtcaagaatatgaactaaaagaactcaatgaatggttgcttgcttcagggtatcagcgtgattctttggtagcacggccaggcgaattcgccatccgtggtgatattttagatgtttatccactagatcgagaaaatcccgtgcgaatcgaattctttggtgacgaaatagatacaattaaggaattcgatttagctagtcaacggagtcaaaaagagttagacaaagtagaagttgcagcagctcaagatcgagtttttactaaggatgcaattgcggcagcggctaagaaaattgaacaagatatggccagtgcaccagctcccgctaaagctgtcaaggaccactttgcggcagttcttgatgaattaaacgatggcggtttacctaaaaactatgctttcttaattgactatttgcttgaaatttctagtagtttactcgaatatttgcctaaaaatgggcagattttatttgacgatttgcctttaattaatcaagcggttgaaacagttgataagcaaaacgctgcttttattaatgatgaactaaaaactggtgcaatgttgccagggcaaagcttgcggtcagattatacaaagattctgagcaaagataagcaccatcgtatttatttctcattgtttcaacgaagcatgggacgactgcgcttaggccagatgctcaattggtcaacacgtgagccagaacaattctttagtcaaatgccgctgattaagtcagaattagaatcttatcaaaaggcggggcaaaccgtcattttacaggctgataatgaaaaaagagcacagcaaattgatcaaacaatggttgattttggcttaaatttaccaattgttggtgcagacgaaattgttgaacaacggacacaaattgtagttgatggctttgttagtggctttagtttaccaacagttaaattggtatatctaacggagcgtgaactatttaataagcgcccacaacgtaaaaaaagaattaagacactggagaatgcccagcgtttgcgcaattatactgaactgaagccaggggattatgttgttcatgttaaccacgggattggtcggtttgaaggaatcaagactttagaaaataatggtaccaagcgtgactatattacgattacctaccagcatggtgatcagctttttgtaccagcagatcaattaagcttagtacaaaaatacgttggttcagaaggtaagacaccacatattaataagctaggtggtagtgagtgggctaaaaccaagcgtaaggttcaatctaaagttgaagatattgcggatgatttgattgaactttatgccaaacgtgaatcagaaaaaggctttgctttttcacctgatgatgatctacaaaaacaatttgaagatgcctttccttatccagaaacacctgatcaattgcgatcggttaaagaaattaagcaagatatggaaagctcgaagccaatggaccgtcttttagtaggggatgttggttttggaaaaactgaggtagccttacgagcagcttttaaggcaattcaggataataaacaagtagcctttttagtacccaccactattttggcgcaacaacactatgagacgattcaagatcgcttcaaagatttcccagtcaatactgctatgctatctcgttttcaaacgccagttgaatcaaaggaaattattgaaggactaaaaaatggcaagatagatttggttgttgggactcaccgtattttgtctcaagatgtaaaattcaagaatctaggattgttaattgttgacgaggagcagcggtttggcgttaagcacaaggaaaagttaaagcagttgaaggcaaatattgatgttttgacattaacagctacgccaataccgcgaacgcttcatatgtcaatggtaggtgtgcgtgatctctcagtaatggaaacgccacctcaaaacagataccctattcaaacttatgtgatggaacaaattcctagtgtagtaagggatgcatgcttgcgtgaaatgcaacgtgatggacaggtcttttatttacataatcggattagtgatatcgatgaaactgtcgaaaaactgcaggaattgatgccacaggcgcgaattgcagctgcccatggtcgaatgagtcagaatcagttggaagatattctttatcgcttcctgaatcgcgagtttgatatcttggttacgactacgattattgaaacaggaattgatatgcccaatgtcaatacaatgatcattgaagatgctgaccactatggtctaagtcagttgtatcaattgcggggtagaattggccgtagtgctcgtttggcttatgcttacttcttgtataagccaaataaagttttaactgaggttggtgaaaaacggcttgatgcgatccgtgacttcactgaactgggttctggtttcaaaatagcaatgcgtgacttatcaattcgtggtgctggaaatatgctgggtgcacaacagcacggctttattgatagcgttggttatgatttgtactcacaaatgctggctgatgcaattcaagaccgtaaggggaagacaacagtcaaaaagtcaaacgcagaaatcgaccttggacttgaggcttatattccagattcgtatatcggtgatcaagaagaaaaaattgaattttacaaaaagattaaagccgtctcaagtcaggaagaattaggtaaaattgaagatgaattaatcgatcgttttggtgactatccaacggccgtcgagaatttattagctgttgccggtctaaaggttgatgctgacatggctcaagtgctcaatgtggttaaaactgacgataagattaaagtggaatttacgaatgcagcttcacgcgaacttgagggacctaatatttttaaggcattggagcatgtaagcttaaaggctcgcattagtatgaatcaagaaaaaagaatggttgtcttgctattgttgccggataaaatgaagaatcgtgttttattcaatgaactggcaatctttttacaggcagcaagcgacattgtacaaaggtaactgtaggagaaaaatatgaggattgataaatttttaaaagtttcacgattagttaagagaagaaccgtagctaaagaaatggctgatcaaggtagaatcaaagtcaatggtcgagttgtaaaatcaagctacgatgtaaaaattgatgatattattgaagtaggttacggcgccaaaaccatcaaggctaaggtgttaaatattcgcgagaccacgaaaaaagcagaagcaagtgaactgtacgagctagttgattaatgacttttgattaaatcgttgttatacttgacttagtatagttatttagtaattaggggattaaacaatgaatcatggtccacgtatatataattcgttgagtccagaagagcagagggcgcgtcttagacgtaaacaggctaaattagagaaagaaacacaccgcaagcggttgaacgtaattatggcagtttttgctatcattttcgttgctttaggtgtacagattgcaatcaagatttctcaaactggacgactgaataatcaagtacaagctgaaaaacagactttaactaaagtaaaaaataagagaaatgacttagaaactgaaaagcaggatttgaaggatccaaattatgttgctaagctgattcgttataaattctattattctaaatcaaatgagaagatttataacgtgcatgaaagaaatgatgataactaatggaaaagtatcaagctggtaatcgggtgactggtgtaattaataacattactgacttgggcatctttgttactttacctaatcggcattctggtttggttcatcatagtgactttggcaataattggctacgcgaacgtcgtcgttatcatgctggcgatgaagtgcgcgtggttgtggtgcacatccataaagggagatttaatttatcgatcactcgagtgaatgatccggaattagttgaccatgataatcaattttctaagacaaagccagctgattttgatcaagtcctgaatcaaacaacgcgggatgctaaagaagaaattgaaaagctaaagcaagtattaactgagaattaagagatggtccgaaagggccattttttgttagaaaaataatgaaaattaatgatttttttgaacaacatcagattgacttaaaggataaaagactattagtagccgcaagtgcgggaccggattccatggctttactagatatgctagttaatttgcaaaaacaactaagttttactgtttttgcggcacattttgatcatcaattgcgtgcggatagctcatatgaagtagaagttttgcaaaattattgtgctcaaaagaagatttgcctgtttaatggcaagtgggataaacatgatcagccccaaacgggaattgaggcagcggcgcgagaggcacgatatcattttttgactaatgttgctcatagcgagcgaatgaactatttattaactgcgcatcatggtgatgatttgctagaaaatattttgctcaaatttattcgctcgggaaatcctgaagagatgaatagtttgcaagatatcggctctatgcatggcgttgttttgcttagaccactattagcctatagtaagcaagaattactcgaatatgatcaagagcgtgaaattgactatgtaatagattcaactaatacggaggatgagactgttcgaaatcgactgcgtcatcatgtggtgccattattaaaagaggagaatcctaatttaattagtaatgcactgcgttttagtgaaaaaatgagtcaattgacggatttggcggatgagcagttgaatagtatgagaacggttgagccatttttgggtgcttggcgaattaaaacggacaacttaaatgatttatctacagaagaaaaaaatattttttggcaaaagataatctggcaaaaatatcatcgccgggtaaatgaaaatttgggcaattttgaggtgattgattatcaaggttatagttatttagttgaaaataagccacagaaaattgtgcagccatttagtatcgaactaaatcagcaatttgaattcaacggagcttattatttactaactactgataggcaagctgatttgaaagaaataggaagcttttggctggaaagggatgcacattttactgcgggaagtctagtacctgctagcaaattattgttgaaaaatggtcaacgagttaaggcgaaaaagaaattttcagaaaaggcaattccctttgccttgcgctcttgctgcattacaatttatgctgaaaatgaacctgtttttgtagaaaaatgttatcaaaaacaggactttatcacagatggtaaacattatttcctatacatttattaagaagtcttcaaaataggtgaaaatgttagtggttgcaagctaatttgtgatagaattttaaacgtataacttaaagactttgcggaggttttttatgaagaataaccggaatcggctactttcaaacggccttttctatatagttgtgttccttctgctcctatggggaatcaactgggcactcggcggctctaacaatagtggtagctcagagaatatcagttactcacaatttgttaaagatttgcgtcaaggcaaagttaaaaactttagtgttcaacctgctaatggtgtttacactgtttcaggtagttacaagactgcacaaacaacaaagaatcaatcaaataatagttttgatttctttagtaataattcaagtagaaaagtttcgcgcttctctactaccatgttacagaatgattctaccgtttctaacgtgcaaaacttggcacaaaaaagtaatgctcggatgacaactcaaggagaatcacaatctggcaattggatttcgaccattgtcatgcttgtgccaaccgttttgtttatcgtcatgctttggatgatgatgaaccaaggtggcgctggacgtggtggtggcggcggaataatgaatttcggtcgttcacacgtcaagccagaagatccttctaagaataaggttcgtttctctgacgtagccggtgaagaagaagaaaaacaagaattagtcgaagtagttgaatttttgaaagatccatctaagtacactaagttgggtgcaagaatcccatctggtgttttacttgagggtcctcccggtactggtaagactttacttgctcgtgctgtagctggtgaagctaacgtgccattttattcaatctcaggttcagacttcgttgaaatgtttgtcggtgttggtgctagtcgtgtacgtgacctgtttaacaatgccaagaaaaatgcaccaagtattatctttatcgatgaaattgatgccattggtcgtcgtcgtggcaatggcaccggcggtggtaatgatgaacgtgaacagactttgaaccaattattggttgaaatggatggttttgaaggcgatgaaggtgttattgtcattgctgctactaaccgttcagacgtcttagacccagctttgcttcgtcctggtcgttttgaccgtaaggtattggtaggtcgtcctgacgttcgtggtcgtgaagctattttaaaggttcacgctaagaacaagccgcttgcacctgatgttgatttgaaggaagttgcccgtcaaactcctggctttgtaggtgcagatttggctaacgtcttgaatgaagccgcattagttgctgctcgtcgtaatggtactgagattactgcatcagatattgatgaagccgaagaccgtgtgattgccggtccagctaagaaggatcgtttgatttctgaaaaagaaagaagacgtgttgctttccacgaagctggtcactcaatctgtggtttggtcttaagcgactcacgtactgtacgtaaagttactatcgtacctcgtggccgtgctggtggttataacatcatgttgcctaaagatgatcaattcattttgactaaaaagcaattatttgaacaaattgttggtttgatgggtggtcgtgcaggtgaagaagcaaccattggtgataagtcaactggtgcttctaacgactttgaacaagctactcaaattgcgcatagcatggtagttaactatggtatgaccgaatccttaggtatggttgagcttgaaaaggaaggcgaaagcaatccttacggctttaagccatatagtgaagcaacttcagctaaaattgatgaagctgtaaagaagattttggatgaagctcatgctaaggcccttgagatcgttaaggacaacaaagaaaagcatagaatcattgccgaagctttgctcaagtatgaaaccttgaatgaaaagcaaattatggccttgtataagactggtaagatgcctgaaaaagacgaagatgaatatccgagtgaatcaaaggcttcaacttatgaagaagctaaggctgctgcagagaagcgcgaagttgaaaaggcagaaaaaaaggattcagatcaagcattagctgatcaagaaaaagataccttggagactccatctgaaaagaatcatgaagttgaagaaaataatcctgagaatcccgaaaaggatcaatcagaaaatgaaacttcaactcaagatactcctgcagatgatgagcataaagacaattaaataaaagtagggcctgtcacaggctctatttttttagaaaagaaggataaaaatgagtgattatttagtaaagtcaattgataagactaaaaacttacgcttgttaaccattaccgctaagggtgtagtgagtgaagcacaaaagcggcatgacttgtggtcagcttcagctgctgtgcttggtcgtactttagtaggatctcttttacttgctggtgcagaattgacagataaggaagaattgacagtccgtttattaggcaatggccctgttggtccaaccatcgtgacagctacctccgatttgaaggtaaagggttatgttaagaatccacatattgctttaccacctaagaaaaatggtcatattgatgtgaaaaaagctgttggacaaggatggtttgaagtaactaaggaccttggcttgaaggaaccatacacaggtcaggtaccaattgtttctggtgaaattgctgaagattttgcttactatttgactaagtcagaacaaattccgtcagctgttggtttgtcagtatttgttaatccaaataattcaatcggtgaagctggtggctttatgttgcaagcacttcctggtgctagtgatgctttgatcgatgaaacgattaagcgaattgatgcattgccagcactctcaacttcatttttggatggaatgacaccagaagacttagcacgtaaaatcttaggaaccgattgtaagattcttgaaaaagatgatgtagcctttaactgtgattgttctaaagaaaagtatgctggtattttggaaactttgaagagcgatcaattgaaagcaatgattaatgaagatcatggtgccgaacttacttgcaatttctgcggtaacaagtatcattattcagaagatgaattgaaagatattttagctaaaaagaacaaagataaagattattaaggcaaataaagccctaaggttttaaccagcggggcttttttgatatcataatagggtaattttgaaaggatgatttggtgaataacagctggaaaattcgcgatatcaccattccaaaccgagttgttgttgcgccgatggcgggagtttcaaactctgcattccgcgttgtctgtaaggaattcggagcggggctggttgtctgcgaaatgatttctgatcatgggatcatttatggaaataaaaagacattaagtatgatggatgttgatccgcgtgaacacccaatgagcattcaaatctttggcggaagcgaggaaactttgcttcaagctgctcaatatattgatcaacataccgatgcggatattattgatattaatatgggttgtcctgtacctaaagtaacaaagactgatgcaggttcgaagtggctacttgattcaaacaagatttatcagatggttcacgcagtagtgcagaacgttaaaaagccggtttctgttaaaatgagaacaggctgggataaaaagcatatttttgctgtagaaaatgctttagctgctcaagaagcaggcgcaagcatgattgcgatgcatggtagaacacgtaaacaaatgtatcaaggtgaagctgactgggaagtattacatgatgttgcccaggtgctagatgtgccttttgtggctaatggtgatattagaacacccgaattagctaaaaaagcattggatgagatcggttgtactgcagtaatggttggtcgcgctgctttaggtaacccttggattttgaaagatatggtacactatctggaaactggtgaaaaattgaagccgcaaactgttcgtgagaaggttgaaacggctaaacatcagcttcacgcacttgttaaaattcacggtgaaaagcgtgctgtaccagaatttcgtcagcaagccgcgtattatttaaagggaattccccgttcagcccgtactcgtgctaaaataaatgaggtctggacgcgtcaagaagtatatgatttgcttgataattttgttgacgagtatgaaaaaagagaagaagctcgtgctgcacgacgcgcgacaatgaacaaataaatggaggaaaagtaaattggcaaagaatgaaatgaatgaccaattaatagttcgtcgccagaagatggaagaattacgtgaaaacggaattgaaccatttggtcaaagaaaatttgatcgtcaagatttggcaagtactttagaagaaaagtatggcaacgaagataaagaagaattaaacgctgatatgcctaagaccaagattgcaggtcgtatgcttgcaaagcgtggtaagggtaaggttggttttgctgatctttacgaccgtactggtaagattcaaatctatgtacgtaaggatattgttggcgaagataactacaagatctttaagaaatctgatattggtgatttcttaggtattgagggtgaagttatgaagactgatactggagagcttactattagagcccttcacgtaactttcttatcaaaggctcttcgtccattaccagataagtaccatggtttaaaggacgttgaggcaatttatcgtcaacgttaccttgatttgattaccaaccatgatagttacatgcgttttgttcaccgtacccaaatcattcaagctattcgtgactacttaaatagtcaaaacttcttggaggttgaaactccagtacttcacaacattcctggtggtgctgaagctcgtccatttattactcaccacaacgctttggatattaacctttacatgagaattgctttggaacttccacttaagcgtttgattgttggtgatatggaacgtgtttacgaaatcggccgtgtattcagaaacgaaggtttggacactcaccacaacccagaatttactgaacttgaaagttacgcagcatactgggactaccatgatgttatggatgaagctgaaggtattatccgtgctgcagctaaggttgtttcagatgacggtaagatcacttaccaaggtactgacattgacttaggcaagccattccgtcgcgttcacatggttgacttgatcaaggaaaagactggcgttgacttctggaagccaatgactcttgaagaagcaactaagattgcggaagaccacgacatccacgttgaaaagttctggaaagttggtcacattattaacgccttctttgaaaagtactgtgaagaaactattgttgacccaaccttcgtttacggtcacccagtagaaatctcaccacttgctaagaagaatgctgacgatccaagatttactgatcgtttcgaaatttacatcatgggtgaagaatacggtaacgccttctcagaattgaacgatcctgacgaccaacgtgaacgtttcgaagctcaaatggaagaacgtgaagcaggtaacgacgaagctgacatgatcgatgaagattaccttcgtgctatggaatacggtatgccacctacaggtggtttgggtatcggtattgaccgtttggtaatgcttttgactgatgctccagctattcgtgatgttcttttgttcccaacaatgcgtccagaacgtgttgaaagcgtagaagctgaagttaaggctgatatggaaaagaagaataaagaaaataagtaatcttataaattaaaaaactcttatctatgttttaagcatggataagagtttgtgtttatatattttttaattgagaatcattttttcatcagagtattttttaggatcatttaaatcccattgctgatatctaacttcttgacacttaaagcctaattttttgtaaagctttttggccttagtattttctgcaaatacatcaagactaactggtcgactcatgtatctcaaagctgtcgttgctaaagcatacccgatacctttattttgatgaattggatctacataaatgtaatccagttcttggggatgaactgcaacgaagcccaatatgctgtcagcatcataagctacataaattttgcaggagaaaaaatcatccttatatggagctgtctctaaaggtatgaagtatttttccgcaccaccaattgttagctcttctttacgactaacgtcgtgaatgcgacatacttcagcataatcgtttggttgatattctctgatattaaattttggcatgtttttctcgcttcctaatattaagattttgatttagaaagcaatagtacgtaatctcatgtgaaatctcctttaattaaattgaagatattatagcaatttttttaattcggtacaataactaaaattaacttagttaaaaacagataagtaatattttttcaaaaagtatttgcaaagagaataatctttgctataataatttttgtatcgcggaagtagttcagtggtagaacatcaccttgccatggtgggggtcgcgggttcgaatcccgtcttccgctccaagatgaagagctcacgaatgtgagctttttttgtgcctaaaataaatttatcttttttgataaaaaggtcttgcaaagaaaaatgtatttgctataataatatctgttgtcgcggaagtagttcagtggtagaacatcaccttgccatggtgggggtcgcgggttcgaatcccgtcttccgctccaagatgaagagctcacgaatgtgagcttttttgtgcctaaaataaatttatcttttttgataaaaaggtcttgcaaagaaaaatgtatttgctataataatatctgttgttgcggaagtagttcagtggtagaacatcaccttgccatggtgggggtcgcgggttcgaatcccgtcttccgctccaagatagaaggctcaccaagtggtgagtctttttttacgggaaatagctcagtttggtagagcgctacgttcgggacgtagaggtcgccggttcaagtccgattttcccgatatacaagctatccgtttgggtagcttttttctttttgttataatatcttttaaaacttaaagggagattaaaaatgacggcaactactgaagaaaaatacaaattattagtggagcaagctagagctttgattgagggagaagatgattggattgctaatacagctaatttatctgctcttttgtttaattcgttaaatgatgtgaattttgcaggtgtttatcgctatgaaaatgatgaactgatattaggtccatttcaggggatgccagcatgtgttcatattcaaatgggaaaaggtgtttgtggtacggctgcacaagcaaaaacaacgcagattgttaaggatgtacatgaatttgctggtcacattgcttgtgatagtgcttcaaattcggaaatcgttgtcccaatttttaatcagggaaaactttggggcgtctttgattttgattcgaccaagctactaagcgtataattttttacggtaagttgaataaataattaaaaaagcccaagtcctttgaatttggacttgagctcaaacaaaaagaccagtagtctgatgttaagaacaaaaaacacattagaagctggtcttttatgaattcaattgtaactgaaatcgcaaatattataaagtctgaagataattatattaagcgtgaaagaaaaataatctgtttcttcttaaacctgattaaggaaatcatggccttggctttagctaaagttgatgatgaaatgattaccaaggttaaagcacagggatatcagattgataagaagaatgagcgctcaatcaatatggcttttggcgaagttaggtatgtcagaagaagatatgtctgcccaggcaaacaagcaaggtatcccttggatgaattaataggctttgacaaatacaagcgctacagtattttagcagtcaaaaacatcttagaagtaagcagcgttgccacttatcgcaatactgctctagcagtcaattgcctgtctggctttaatattagccatatgcaggtgggcaatttggtaaaaatggccgggaaaaatattaaagcgggccaagaagcagattcaagatatgatgccgcaggcactaagaaaaaggtcccagttttgtatcttgaaggcgatggcgtggtgatcaaaggcactaaaagccggttggaatttcatcgctatcaggtctgtgaaggcattgtcaatataagcaagaaacgcagaaagcgaatcaatgccaaggaatttgtttctttaagccgacttgatgcgctgaacgaagccaaggagtacctggccaatacttatgatctttctgatactgtaattcttagcaacgccgatggcggtgctggatatgccaaaacagacttcgatgacattgtagggctatgcaagcgtcatgagcatttcttggatgtctttcacctaaataagaaaatcaaagaaaggctatattttgcgcctgacctgcaaggcaagctgatttctgctttggaatacaaatacagctatgacaaagttaaaactatcctaaccactgcagaaagccgactaattgatgaattgaataccgagctcaatcatgattatctggggcgcctaaggaattatattgatcgtcattgggacgatattaagccgtttaagaaacgaaaactgactgtgactaaagccattggctgctgcgagagcaaccaccgcaagtatacctaccgtgttaaggggcaaggcaagaaatggtcaaaatctggagcagaaggcatgcttaggatcttaagctgcatcaagaatcgagagctggaattttggcttagcagcgagtttgaagattcagaaataactgtattgactgaacaggaattaaaagcagcggcccgtgacagcttaaagaagcgtcatgaagttcatttaggcatccagcatggcgcattaaccgcacaggtagctggcaatagttatttaagcaagctaagcagaaatttaagtcatataaatatttaagaaattaaggttagactaatggtttaaaggctaccgcaaaaacattgacacttacaccaagctagctaattttgacgaaattgataaaaagtatttaactgaaatagcgaaagcaatttttgcgtaattattagaattggacataatgaagttgaagataagtcaaattgttttacttactgacaaaagaaaagtaaaataccataacgtattttaaagggtggtgtttgtatggaaaattcatatagtaagagcgttaatcaagtattgaaaattgcacgtgaacaagcacaaaattttcatcatcgcttgattggcacagaacatgttttattggctctagtaattgaaactgacggtgaagcaggaaaaatcttgcgttcatggggattaacaccaactgcagtacgtgaagaaattgaacgttatacaggttatggctctgcccctaaggcaagctacatggaaatgtcaccacgtttgagtttagctttggattatgctagaagacgagctaatgacgatggagttaaggaagttaacactaatcatgttttgctgggaattactgcaagtgagcaggttttatcagcaatgattttgaaaaacttgaatgttgatattcctcgtctgcagcaggatgttgaagacagtttgagtcaagaccaagactttggtgattcagctaattggctgggtgatgataacacgacgactggtcaaaagaagcgcaagagcactactcctaacttagataaggtagcggttaatttaaatcaacgtgtgcgtaatggcgagattgatccggtgattggccgtgaccaagaaattaagcgtgtgattcaaattttgtctcgacggactaagaataatcctgtcttagttggtgaaccaggagttggtaagactgctgttgctgaagcgattgcaactgagattgtcaacaaaaaagtgccacaggatatgcttaagaaacgggtaatggccttaaatttaggtagtttagttgctgggactaagtatcgtggtgagtttgaagacagaatgaagaaaatcctgaacgaagtcaccaaggatggcaatgtcattctctttgttgatgaaatgcatactttaattggtgctggtggtgctgaaggtgcaattgatgcttctaatatcttgaagccttcgcttgctcgtggcgatattcaaatgattggtgcaactacttttaatgaatatcaaaagtacattgaaaaagatcaagctttggcacgtcgttttcaacaagtgcgcttaagtgagccttcaagagatgacactttgacaattatgcgtggcttgaagtcgaaatatgaaaagttccatcatgtgactatttctgatgagagcttgaaggatgcagttgatttgtcaacgcgctatatttcggatcgctttttgccagataaggcgattgacttagtagatgaagctagtgccgcagttaagattcgtaataacattagcaatgatgctgagctagaaaaagttaatgagcaaattaagaaactgattacgcaaaagaatatggctgccgctagtcaaaactttgttaaagctgctcaattgcaggatgagcagaacaacttagaaatgcaacgtgaagcaatggtagagaagttagaagacaaagttagtgctaaagctgtggttgagccagaagatatcgctaaagtagtttccaactggactggcgtccctgttacccagatggaacgcaatgaatcacggcagctagctaacctggaaaagattttacaccaacgtgttattgggcaagataaggctgtttcagcagttgcccgtgctattcgtcgtagtagaagcgggattaaagatgaacgtcgtccgattggttccttcttgttcctaggtccaactggtgttggtaagacagaactagctaagtcagttgcagcagcaatgtttggctcggaagacaatttgattaggctagatatgtctgaatatatggaccaaattgcttcaagcaaattaattggctcggcaccaggctatgtcggttatgaagaaggcggtcaattatctgaaaaggttcgtcgtcatccgtactcggttattttgcttgacgaagtagaaaaagctcatccagatgtctttaacttgcttttgcaggttttagatgaaggatttttgactgactccaaaggtagaaaagtcgactttagaaatacaattataatcatgacttctaatttaggttctcgttcgctctttgataataaggcagtcggcttcaatgcagataatgcagatccagccaaggcgagatcagctaaagttgaacaagcaatcaaacaattcttccgcccagaatttttaaacagaatcgatgaaactattatcttcgatgaactagataagaagcagctgcgcaatattgtaactttgttaacgcacaagctggtagttcgtttgcaaaagaagggtatcgaattgaagctatcacgggcagcactggatcagattgcacaagatggttatgatccagaaaatggtgctcgaccattgagaagagcaattcaaaatgatattgaagacaagattgccgagatgctgattgtaggcgaagttaagtcaggcgacactttgaaaattggtagtcagcatggacatttaaaatttgaagtagttaatccgaaaaaagaaactgtaaaagtcaagtgatattggtgctataccttgacaaaatgctgaaaatatcatataatttttgctgatttaaaaagactgagattcaggattttgctgatctattgtccagcaaaatgataagggacaaaaacgacaattgttgtttttgtcttttttatgcctaaaattgcagttttttgaatttgtaacagaaatgtaatatttgctttcttagacagaaaggatgtttttccttgttaaatggacacgtagtgaactatggtaaacatcgaactagacgtagcttctcccgcattaaggaagtattgaagttacctaacttaactgatgttcaaaccgaatcatataagtggtttcttgataaaggcattaaagaagtctttgatgacattatgccgattagcgatttctcaggtaagctttcattagaatatgttggctataaattgcaaaagccaaagtatacagttgatgaagcccgtaaccatgatgcaacttatgctgcaccaatgcacgttaccttgaaattgactaaccaagaaactggtgaaattaagactcaagatgttttctttggtgatttgccattaatgaccgaatcaggttcatttattgttaacggtgctgaaagagttatcgtttcacaattggtaagatcacctggtgtatattacactggcgattatgacaagaatggtcgtcaaatctttggtactactgttattcctaaccgtggtgcttggcttgaatatgaaaccgacgcaaagaacgtttcatttgttcgtgtagaccgtactcgtaaattgcctcttactgtattgattagagcaatgggtattggctctgacagtgacattattgatatgtttggtcaaagtgatactttgcaattcactttggacaaggatgttcataagaacccagctgactcacgtgtagctgaagccttaaaggatatctatgaaagacttcgtccaggtgaaccaaagactactgattcttcacgttcacttttgtatgcccgtttctttgatccacgtcgttacgatttagcacctgtaggtcgttacaagatcaataagaagctttcacttaagaaccgtttatacggtcaaactttagctgaaactttagctgatccagatactggggaaattgttgctaagaagggtactgtagttacccacgaagtaatggataagttagctccataccttgatcgtgatgactttaagatggtaacttaccaaccttcaaaggaaggcgtattaccagatcctattacagttcaagaaattaaggtttactcaaaggtagaccctgaacgtgaagttaaattaatgtcaaatggtcatattgctgataacgttaagcatttgactccagctgatgttttagcttcaatcaattacttctttgcattgcaagatgaaattggtactactgatgatatcgaccacttgggtaaccgtcgtattcgtcgtgttggtgaacttcttcaaaaccaatttagaattggtttggcacgtatggaacgtgttgttcgtgaaagaatgtcaatccaagatccttcaacagttactccacaacaattgatcaacattcgcccaattgttgcaagtattaaggaattctttggttcatcacaactttcacagtttatggatcaacataacccattaggtgaattgactcataaacgtcgtatgtcagccttagggcctggtggtttgacccgtgaccgtgctggttatgaagttcgtgacgttcactatactcactatggtcgtttgtgtcctatcgaaactccagaaggtcctaacattgggttgatcaactcacttgcttcatatgcgattattaataagtatggttttatcgaaaccccataccgtcgtgtttcttggaaggaccacaaggttactgataagatcgactatttgactgctgacgaagaagataattacattatcgctggtgccaacactccattgaatgatgatggttcatttaaggagaagttgatcttggctcgtcaaaaggaagataacgtcgaagtttctccagataagattgactacatggacgttattcctaagcaagttgtttctgtcgcttcagcatgtattccattccttgaaaacgatgactctaaccgtgctttgatgggtgccaaccagcaacgtcaggctgcaccattaattaatccgcatggttcacttgttggtactggtatggaataccgtgctgcacacgattcaggtgctgctttaatcgctaaggctgctggtgtagttgaatacgttgatgctaatgaaatccgtattagacgtgaagatggtactttggacaaatacacacttgaaaagtaccgtcgttcaaataactctaagtcatacaaccaaactcctaatgttaaattaggtgatcaggttgacaagagtgatgtaattgctaacggtccaactatggatcatggcgaacttgctttaggtcaaaacccattgattgccttcatgacttggaacatgtacaactatgaagatgccatcatgctttctgaacgattagttaaggatgatgtttatacttcaatcagtattgaagattatgaatcagaagctcgtgacactaagttaggtccagaagaaattactagagaacttcctaatattggtgaggatgctttgaaggatcttgatgctgatggtatcgttcgtgttggtgcagaagtccacgatggcgacattttggtaggtaaggtaactcctaagggtgtaactgaattatctgctgaagaaagattacttcacgctattttcggtgaaaaagctcgtgaagttcgtgatacttcacttcgtgtaccacacggtggtggcggtattgttcaagacgttaaggtttatactcgtgaagccggcgatgaactttcaccaggtgttaacacaatggttcgtgtttacatcgctcaaaagagaaagattcaagttggggacaagatgtctggtcgtcacggtaacaagggtactgttgctgcagttgttccagaagaagacatgccatacttaccagatggtactccagtagatatttgtttaaacccaatgggtgttccatcacgtatgaacatcggacagcttcttgaattgcacttaggtgcagctgctcgtcaattgggcattcacgttgcaacaccagtatttgatggtgctgacgaaaatgacgtttgggacacagttcgtcaagcaggtgttgataaagatggtaagaccgttgtttatgatggtcgtaccggtgaaccattccacaaccgtgtatctgtaggtgttatgcactacttgaagttgacccacatggttgacgacaagatccacgcacgttcaattgggccttactcattggttactcaacaaccacttggtggtaaagcacaatttggtggtcagcgttttggtgaaatggaagtttgggcccttgaagcttatggtgctgcttacacattgcaagagattttgacttacaagtcagatgacgttgttggtcgtgtaaaggcatatgaagctattgttaagggtgaaaagattcctaagccaggtgttccagaatcattccgtgttcttgttaaggaacttcaatcattaggtttggatatccgtgttcttgatatgaaccataatgaaattgaacttcgtgatatggatgaagactcaagtgaacacttgaacatcgatactttgtcacggatggcagaagagcaagaaaagaagaagttagccgaagaaactggaaaatcagaagataaagacagtaaagaaaatgcagataagccggtagctcctgcagatgagtctgacgataaagtttctaaatagtaggaggttaaacttttgatcgacgtaaataagtttgaaagtatgcaaattggtcttgcatcacctaacaagatcagaagctggtcatatggtgaagttaaaaagccagagaccatcaactaccgtactttaaagcctgaaaaagatggcttatttgatgagagaatttttggaccaacaaaagattggtcatgtgcttgtggtaagtacaagggcgttagataccgtggtatcgtttgtgaccgttgtggtgttgaagttacttcttcaaaggtaagaagagaacgtatgggtcatattgaattggctgcacctgtaactcacatttggtactttaagggtatcccatcaagaatgggattagttttggacatttctccaagattacttgaagaagttatttactttgctgcatacattgtaattgatccaggtgatactgaccttgaacctaagcaattattaactgaagctgaataccgtgaacaaaaagctaagtacggtaaccgttttgaagctaagatgggtgctgaagctgttcgcgatttgcttaagaaagttgaccttgataaagaagttaaggatttgaagaaagaacttcaaactgccactggtcaaaaacgtacgcgtgcaattagacggttagatatcttggatgccttcaagaattcaggtaacaagcctgaatggatggtaatggatgccgttccagtaattccaccagatcttcgtccaatggttcaacttgaaggtggccgttttgcaacttcagatttgaacgatttgtacagacgtgtaatcaaccgtaacaaccgtttgaagagattgcttgatttgaacgcacctaatattattgttcaaaacgaaaagcgtatgcttcaagaagctgttgatgctttaattgataacggtcgtcgtggtcgtccagttgttggaccaggtaaccgtccattgaagtcactttcacatatgcttaagggtaagcaaggacgtttccgtcaaaacttgcttggtaagcgtgttgactactctggtcgttcagttatcgatgtttcaccaaaattgaaattctatcaatgtggtgtgccacgtccaatggctttggaattgttcaagccatttgtaatgcatgaattagttaaacgtggaattgcatcaaacatcaagaatgctaagcgtaagattgaccgtgaagatgacgatatctgggatgtacttgaagatgtgattaaggaacgtccagttcttttaaaccgtgcacctactcttcaccgtttgagtattcaagcctttgagccaatcttggtaccaggtaagtcaattagacttcacccattagcttgtgaagcctacaatgccgacttcgatggtgaccagatggctattcacgtaccactttctgatgaagctgttgctgaatcaagattgttaatgttggctgctcaccacattttggctcctaaggatggtaagccaattgttactccatcacaggatatcgttttgggtaactactggttaactcaggccgaacgcggtcgtgaaggtgaaggtatgatcttcagctcaccagcagaagctgctgtagcttacgaaaatggcgatattcactaccataccattattggtatgtctgcagatgctatgcctaaaaagccatggcctaagggacatgaacacggcatctttattaccacttatggtaagattgtcttcaatcaattgttcccagatgattacttctatatcaatgaaccaactgaagagaacttgaacaatccgttggatgctaagtacttcttaggtgaaggcgaagagattgataagaagatcgatgaagtaggcgatgatttaatcgctagtccatttaagggaagcttcttgtcagattctattgctactatttacaagtattacaaggttcaaagaacttcagaatacttggatgatttgaagaagttaggctacattagctcaactacttcaggtattactattggtatgactgacgttccagaaatccaagataaggatgaaaaggtagccaaggcacgtaaacaagttgatgttgtttctaagcaatttagacgtggtttgattactgaacaagaacgtcacgaccgagtaattagtatttggaatgcatgtaaggacaagatccaaaacgaaattgcacaaattcacgcacctcgtaatccaatttcaatcatggcagactcaggtgcccgtggtaacatttctaactttactcagttagccggtatgcgtggtttgatggccactcctaacggtggtttgttcgaaattcctgttacttcaaactttaaggaaggtttgtcagtattggaattgttcatgtctactcacggtgctcgtaagggtatgactgatactgcattgaagactgctcagtcaggttacttgactcgtcgtttggttgatgttgctcaggacgttattattcgtgatgacgattgtggtactgatcgtggtattacagttagtgccatcatggaaggtgacgaaatgatcgaaccattatttgaccgtttggttggtcgtttcactgctgagactgttaaagatcctgaaactggcgaaactattgtcggcagagatgtcatgatggatgaaaacatggcacacaagatttgtgatgcaggtgtaactcacgttaagattcgttcaattcttacctgtgatactcctcacggcgtatgtcgcaagtgttacggtatgaaccttgctactggtgaagaagttgaagttggtgaagcagttggtactgttgctgctcaatcaattggtgaaccaggtactcagcttactttgagaactttccacaacggtggtgttgccggtgctgaagatatcactcaaggtttgcctcgtgtgcaagaattgtttgaagcacgtaaccctaagggtcgtgcaaccatttctgaagttgatggtgtaattgattcaattcaagaaaacccagcagaacatactcgtgaaattactgttaagggtaagattgatactagaagctacagtgttccttatacagcttcagttgctgttagcgaaggtgactacgttcatcgtggtgacaagttaactcttggttctgttgatcctaaggaattgattcaagttactgatacattaactactgaaaagtacatcttagctgaagttcaaaaggcttatagaatgcagggtgtagacattgccgacaagcacgttgaagtgttaactcgtcaaatgctgcaaaaggttcgtgtccttgatccaggtgaaactgacatcttgccaggtgaagttatggatattggtcaatttagagaccgcaacaaggaagttattatttctggtggtattccagcaactgctcaaagcgttatcttgggtattactaaggctgctttggaaactaacagtttcttgtcagctgcttcattccaggaaaccacacgtgttcttactgatgcatctattagaggtaagaatgatccacttcttggacttaaggaaaacgttattattggtaaaattattccagctggtactggtatgcctgtataccgcagcatggaacctgaagctgacgttaagaagccagattcagtatactcaattgctgatattgaaaagcaaatgaaagaaaaggataaagctaagcaagactaagctttattgaaaataaataagcatttccaatcttttaagagcgggaatgcttatttttttgtctaaaaaattaattgggttagtactaatcctaggaaaatatatggaataaatggatagcgatggttaataggagttttttcaataagaaaaattgcaattaccaagattgaagcaaatagaaaaactaaattggcaaatgatggggtgaagtagcaagcgataattaagtaaattaataaatcgcctagccccatttttctttgcattatgctatagctaaaaattcctagcaataatgtaaaagagatccagtcgattaatgtaaaagctgcaaattggttgaataaaatcgcaacgctaatggctggaattagtaggagaagatcaaattcttgcttttgataatcagagattgcaacgactaaaagcgaaaaaagcaaaatagcggtaataatgtcctgtgtcttactaaaatcgagtaaacaaaaggcaaagccgccaattaattcaaataaaaataattcaactggaatttgttgataacaataacgacattttccttgaagaaaaagataagataataatggaatttcatccaaaattgataattcaaggtgacagttgttgcactgagaacgtgagtaaataaaatttttatcattccagtgctcgtaaactactgctgcgtgagaagccaagcaacttccaattataaagttagtaaaaataaataagtatttcaaaaaaacacctccactatttattacgcaaaaatagccgatttttctttttttattttgaaaaagtttgctttctgcttaaaaccgagtacaatagtctttgtatgttttgaacagtctattcgtgagtaaaaaagaaactcccggatgtgtgaacaaaatagtattttaggaggaaaaattaatgccaaccattaatcaattggtaagaaaaggccgtcattcaaaggtcactaagtcaaagtcacctgctttgaattacagctacaacagtatgaagaaggaatcagtattcaacccagctccacaaatgcgtggtgttgcaactcgtgttggtactatgactccaaagaagcctaactcagctttacgtaagtacgctcgtgttcgtctttcaaacttgatcgaagttactgcttacattccaggtgaaggccacaacttgcaagaacactcagttgtattaatccgtggtggtcgtgtaaaggaccttcctggtgtacgttatcacatcgttcgtggtgcccttgatactgctggtgttgatggcagaaagcaaagccgttctaagtacggtactaagaaagattaaaggaggagttaaataatgcctagaaaaggtcacgtaactaagagagacgttttagcagatccagtttacaactcaaagcttgttactaagttgatcaaccacttaatggtcgatggtaagagagctaaggcatcttcaatcctttacgatgctttcaacattgttcaagacaagactggtaaggaaccacttgatgtatttgaagaagctatgaacaacgttatgccagttttggaagttagagctcgtcgtatcggtggttcaaactaccaaatcccagttgaagtacgtcctgaaagaagaactactttaggtttaagatggcttgtttcatacgctcgtttacgtaacgaacacactatggatgaacgtttagctaacgaaattatcgatgcttcaaacaacactggttcagcagttaagaagcgtgaagatgttcaccgtatggctgaagctaaccgtgcatttgcacactaccgcttctaatttgttcgttttaatttaaggagagaataatttatggctaacaagcgtgaatttccattagcaaagacacgtaacatcggtattatggcccacatcgatgcgggtaagactactactactgaacgtatcctttactacactggtaagatccacaaaattggtgaaactcacgaaggtgattcacaaatggactggatggatgaagaaaaggaacgtggtatcaccattacttctgcagctactactgcacaatggaaagaccacagaattaacatcatcgacaccccaggacacgttgacttcactatcgaagtagaacgttcacttcgtgttcttgatggtgccgtaactgttcttgatgcccaagctggtgttgaaccacaaactgaaaacgtatggcgtcaagctgaaacttacggtgttcctcgtattgttttcgttaacaagatggataagatcggtgctgacttcgataagtcagttaagtcattgcacgaacgtttaaacgctaatgcccatgctgttcaaatgccaattggttcagctgacacttttgaaggtgttatcgacttaatcaacatggttgccgacatctacgacgaagataagcttggttctaagtgggatactgttccagttcctgacgaatacaaggaagaagctgaagcacgtcgtaacgacttaattgaagccgtagccgatgttgatgacggcatcatggaaaaattccttggcggtgaagaaatttctaacgatgaattaaaggcagctatccgtaaagctactttggacttgaagttcttcccagtttacgctggctcagccttcaagaacaagggtgttcaaatgatgcttgacggtgttattgactacttgccatcaccacttgacgttaagccttacgttgctcacaatcctaagactggtgatgaagttgaacttatggctgacgataagaagccatttgcagctcttgcatttaagattgctactgacccattcgtaggtcgtttgactttcatccgtgtttacaccggttctcttgaatcaggttcatacgtattgaacgcttcaaagaattcacgtgaacgtgtaggtcgtttgcttcaaatgcacgctaactcacgtactgaaattccagaagtattctcaggtgacatcgctggtgctatcggtttgaagaacaccactactggtgactcattaactgacccagatcacccacttattttggaaagcttgaaagttccagatccagttatccaagtatcagttgaacctaagtcaaaggctgaccgtgataagatggacgttgctttgcaaaagcttactgaagaagacccaactttccgtgctgaaactaacccagaaactggtcaaaccttgatttcaggtatgggtgaacttcaccttgacatcatggttgaacgtatgagacgtgaatttaacgttgatgctaagattggtgaaccacaagttgcttaccgtgaaaccttcaccaaggaagctaaggcacaaggtaagtttgttcgtcaatcaggtggtaaaggtcaatacggtgacgtttggattgactttactcctaacgaagaaggtaagggttacgaattcgaagatgccatcgttggtggtgttgttcctcgtgaattcattccttcagttgaccaaggtttacaagaagctatgaagaatggtgttcttgcaggttacccattgatcgacgttaaggctaagctttacgatggtagttatcacgaagtcgactcatcagaagctgccttcaaggttgctgcttcacttgctttgaagaatgctgcttcaaaggctggcgcagttatcttggaaccaattatgaaggttcaagtaactactccagaagaatacttaggtgatgttatgggttcaatcactgctcgtcgtggtaccatggaaggtatggaagacagagccggtgctaagatcatcaactcatttgttccactttcagaaatgtttggttacgcaactactttgcgttcatcaactcagggtcgtggtacatttactatggtatttgatcactactcaccaacacctaaatcaattcaagctgacatcattaagaagcgcggcggagatgctgaatagcttccgttaagaactgattaatgcagttagcttaattgaaaacaatttcatataaaaaagagttatcatttttattcaatgtcattaagttaagacattgacaattaatattagacttttaaagcactgatttaacatttaattggttaaattggtgcttttttcgtacaacaaataaggcatagcacagattctgcttttttaagctacgcgatataaataatatacagctgatttgggcttaatatttctcttgtccttgcggcctggtctaattggaatggtataatagctgatctgaataaggatccgttcaaaatcttgcgttaaagaagaagccaaatacatgctctgaataatcaagcatgattgcttgaaattgatggcatattgatacttgcaatgcttttgcggaatataggcctgtgcatcaatttgactgattgcattaaacataatcatatgggcataaatttccatttcaataaatttatcttgtttggaatggaactgtacactgcctaaagaatacttcaatttcttgaaggaggtctcaataccccaacgcagatgataaagctctttaattctttttagcggataattttttcgatcaagattggttagcacaacttcccattcttctttgcctgatttggcatcattaattctaaatttgcaggctcgaaattttattgtgcataactcgccaaaatcccagcttagatcctgggtatttttagagcgatacttaatatattggcgataatgatgctggacatggtgaatattctcactggctttatgcgtgatgtagtaatagttagaagtagttaccaggcaggaaatctcacgatcacattcttgatcaggcaatgtcgttatttctttaactccgccttgtccagccttagttcgtattatgtaatgacagttaggcaggcgattgcagttttcaatcatattgaaactagtgtagccacgatccattgttacaatatatggaccacaattcaaagctttaagcatttgaacagccgctttgcgttcatccatttctgatttaggctgaaaaatacaatcctggtaggtattattcaatagatcatataaggcattaacgtgaatttgacaatagggtttctttttatgagaagaagcttgtacaatgttattcgatttcggattccagatttgattaaagtcagagccatcaatggcaaacaaacggtagtgatgatcaaaaagttgaatattaaatagattttgattaaaaacagtcagaatatgtttaaaacaagcaggagaaagctggcttttgcgttgaacataggcagaagtactaactactttatcgttctttttagttgcatcttcgccaaaagctctaaagagttcactgtttaaattctgaccttgcatgttaattgtagttttaaggactgtcgctgcatctaaagtgcgtttcctggtaaaagcatgaggattattaataaaatcgtgaatatgatccccagtattattgataatttgatcaagacgttctagaatattcttatgaagggctttcataattaacaccatctttctggcaataattttgaaggtttaaaatatataatatataagataggcgaaaaggctggtcttttcgcctttattttatacaaaaaaagagatcgaatccaaatgattcgatctctaaaaaagcacccttaattgtcaatgtcttaacttaatgacattgcatttttattttgataactctttttttgtaaataaatttaagaaaaaagtcgtaaacccttgatatttaaggagggacaaagtacaatagtttttgtgcttatgggacagtgtgcccttaagtgtgaaaatcgttgtaaagcgttgacgcaaaaggttgcggcacgccaggctgcattgccacagtggcgtgcggggaatttttgccgagcgagtcatcttttaaagaagacgttaaggaggtaatttaatggcaagtcaaacaattcgtattagacttaagtcttacgaacatggtattctcgatgaatcagctgctaagatcgtagctactgcaaagagaactggtgctgaaatttcaggtccagttcctcttccaacagaaagaactttattcacagttcttcgttcaccacacaagaacaaggactcacgtgaacaattcgaaatgcgcactcacaagcgtttaatcgatattttgaatccaacaccaaagactgttgattcattaatgaagcttgatcttccaagcggtgtagacatcgaaattaaactgtaatttaaatagaaagaggtgtaaacatgaccaaaggaatcttaggaagaaaagttggtatgactcaaatctttactaaagatggtgtccttgttcctgtaactgttgttgaagcaactcctaacgttgttatgcaagttaagactgttgaatcagacggttacgaagcagttcaattaggttaccaagacaagcgtgaagttttgagcaacaaaccagaaaaaggtcatgctgataaagcaaagacttcgcctaagcgcttcattcgggaaatccgcggtgttgagcttaaggactatgaagttggctcagaagttactgtggatacatttaaggaaggtgacgttgtaaacgttactggtacttcaagaggtcatggataccaaggtaacatcaagcgttggggccaatcaagaggaccagaaactcacggttcaagataccacagaattcctggttcaatgggttccatcattaaccgtgtaccaaagggcaagcgcttgccaggtcacatgggtgtgaagaaagttaccattgaaaacttagtaattgaaaaagttgttgcagacaagaacgtattgatgattaagggtaacgtcccaggtgctaagaactcattaatcgttgttaagactgcttctaaagctgtaaaggctgataaataggaaggaggactagaatggctaatttaaaagttatggatcaaaacggtaaagactctggtgaagttactttaaacgataaggtttttggtattgaaccaaatgaaagtgtcgtttttgaagcaattattagacaaagagccggcaagcgtcaaggtacctcaaaggttaagaatagatctgctgttcgcggcggtggtaagaagccttggagacaaaagggtactggtcgtgctcgtcaaggttctatcagagctccacaatggcgcggtggtggtacagtctttggcccaactccacgttcatacgcatacactatgccaagaaagcaacgtcgtttggctattaagtcagttctttcccaaaagttgattgacaatgatttaattgttttagataagttgactatgtcagctcctaagactaaggaattagtatcaatgttaaacggcttaaatgctgacggtaaagttttaattgtttcagatgataacaatgtacaactttccgcaagaaacttgactaaggttaaggttgttccagttaatggcttaaacgttgaagatgctgttaactatggcaagttgatcttagatcaagatgctgttaagaagatcgaggaggttttggcttaatggacgcacgcgatatcattttaagacctgtcattactgaaaagtccacgaacttaatggatgataagaagtacacattcgacgtgcttttaactgcaaccaagacacaagttcgcaatgctgttgaagaaatcttcgatgttaaagttaagaacgtaaacattatgaacgttcgcggcaaggacaagcgagtaggtcgttacactggtaagaccgctcgtcgtagaaaggctatcgttactttaactaacgattcaaacgacatcaagattttccaagacgataacacagaagacaacaagtaataggaggtcagtcaattggctattaagatttacaagccaaccacgaatggtcgtcgtcatatgacttcttccgactttgctgagatcactaagacaaagcctgaaaagactttacttgaatctcaatcacatactgcaggtcgtaactcatatggtcatatcactgtaagacaccgtggtggtggtcacaaacaaaaataccgtatcatcgactttaagcgtaacaaggacaacgcaaaggcagttgtaaaggctatcgaatacgatccaaacagaactgctaacattgctttgcttcactacactgatggtatcaaagcttacatcttagctcctaagggcttaaaagttggcgatgtagttgaatcaggtgattcagttgacattaagccaggtaacgctttggaattaaagaatatcccaactggtacttcaattcacaatatcgaattaatgccaggcaagggtggccaactcgtaagaagtgctggtgcttcagctcaagttttaggtgctgatggtgattacactttagtaagattacaaagtggtgaagttcgtaagattttgtcatcatgccgtgcaactatcggtactgttggtaatgaacaacactcattgattcaattaggtaaagctggtcgtaagcgttggttaggcaagcgtccacaatcacgtggttctgtaatgaaccctaacgatcacccacatggtggtggtgaaggtaaggctccagttggtcgtcctcaacctatgactccatggggtaagaaggcacgtggtattaagactagagataccaagaaggccagcgagaagttaatcattcgtcaccgtaaaggtagcaagtagtagaaggagggttaattaatgagccgtagtattaaaaaaggtccttttgctgatgcatcattgttaaagaaggttgatgcacaagcagatgcagataagaagcaagttattaagacttggtcacgtcgttcaactattttcccttcctttgtaggtttgactatagctgtttacgatggtagaaagcatgtcccagtatatgtaactgaagacatggttggtcataagttaggtgaatttgttccaacaagaactttccacggacacaaatccactgatgataaagccacaacacaagcttagaggaaggagaaacatctaaatggcagaacaaattagttcagctaaggctgaagcaagaactgttcgcatcgctccaagaaaagctcgtttagtcgttgacttaattcgtggcaagagcgttgctgaagcattagcaatcttggaatttacgcctagagctgcttccccaatcgttgaaaaagttttacgttcagctattgctaacgcagaacataactacgatcttgaaagtgcaaacctttacgtatcagaagcttacgtaaatgaaggtgcaactttgaagagattccgcccacgtgctaagggtatggcttctccaattaacaagagaaccagtcacgtagttgtagtagtttcagaaaagaacgattaagggaggtatattaatgggtcaaaagattaacccaaacggttttcgtctcggtgttatccgtgattgggaatcaaaatggtatgctgacaagggatacaaagaaactttaaatgaagaccttcaaatcagaaaatttatttcagaaaagttgaaggatgcctcagtatctactgttgaaattgaacgtgcagctaacagaattaacatttcaattcatactgctaagccaggtatggtaattggtaaaggtggttctgaagttgaagctttgagaaaacaattaaatgctttaactggtaagcaagttcacattaatattgttgaaattaagaaaccagatcttgatgctaagttagtagcagatagtattgctcgtcaacttgaagctcgtattgctttcagacgtgctatgcgtcaagctactcaaagagctatgcgtgctggtgccaagggtattaaggttcaaacttcaggtcgtttgaacggtgccgatatggcaagaagagaatggcacacagaaggtcgtgttccattacaaactttgagagctgatattgattacgcttgggtaaatgccttcactacttatggtgaaattggtgttcaagtttggatcaaccgtggcgaaatcttacctactcgtaagaataagccagcttcaaagccagcgaagggaggaaatagataatgcctttagtaccaaagcgagtaaaacaccgtcgtgaattccgtggtaagatgcgtggtgctgctaagggtggtaaatatattgcctttggtgaatatggtcttgaagccctcgaatcacattggattactaaccgtcaaatcgaagcagctcgtgttgctatgactcgttacatgaaacgtggcggtaaggtttggatcagaattttccctcaaaagtcatacactgctaaaggtgttggtgtacgtatgggttcaggtaaaggtgcaccagcaggttgggtagctgtagttaagagagaaaagattatgttcgaaattggtggtgttgatgaagcaactgctcgtgaagctttacgtcttgcttcaactaagttaccaattaagactaagtttgtaactagaagttcggaagtaggtggcgaatctaatgaaggctaaagatatcagagcattaaccactgatgaaatgttagaaaaagaaaagcaatacaaagaagaactcttcaatttgcgtttccaacaagcaacgggtcaattagaaaataccgctcgcttgagcaaagtccgcaagaatatcgccagaatcaagactattctgagcgaaaaagcgttagaaaacaattaatggaagggagctattaacttgagcgaaacaaacgaaagaaatcgtcgtcacgtataccaaggtcgtgtagtttctgataagatggacaagactatcgttgtagttgttgacacttacaagaaccaccctgtttacaacaagcgtattagatattcaaagaagtactacgcacaagacgaaaataacgaagctaaagttggcgatactgtacgtatcatggaaacccgtccattatctcgtaagaagcgcttccgtttagtaaagattgttaagaaatctgtttaatttgcggatttagtgaggggaggattacacagtgattcaaaacgaatcccgtttaaaggttgctgataactctggtgccagagaacttttagttattagagtcttaggtggttcaaagcgtaagaccggtaacattggtgacatcgtagtatgtactgttaaacaagcaacaccaggtggcattgtcaaaaaaggcgacgttgtaaaagctgttattgttagaactaaatcaggtgcacgtcgtgaagatggttcatacatcaagttcgacgaaaatgctggcgtaattatcaacgcagacaagagcccacgtggtactcgtatctttgggccagttgcacgtgagttacgtgagaacgactttatgaagatcgtctctcttgctcctgaagtcttataattgatagtgaggtgcactgatgttcgttaaaactggtgacaaagtaaaagttattgccggaaaagataaaggtaaagaaggtactgttctttctgttaacgttaagaaaaaccgtgtagtggttaagggcgttaacaagattaagaagcaccaaaagccttcacaaagcaatgctaatggtggtgtagttgaatcagaaggttcaattcacgcatcaaacgttaaagtaattagtagtaaaaaagaagataagtagaagggaggacacacatggcaagttatttagctaaggaatacaacgaaaaggtagctcctgcattagaagaaaagtttaactacaagtcatctatgcaagtacctaagatcgacaagattgttttaaacatgggtgttggtgatgcagtttctaacgccaagaacttagatgaagcagttgaagaattaactttgatctcaggtcaaaagccattaatcactaaggccaagaaatcaatcgctaacttccgtttacgtgaaggtatgtctatcggtgctaaggtaactcttagaggcgacagaatgtacgatttcttgtacaagttaatcaatgtttctcttccacgtgttcgtgacttccgtggtgtatcaactcgttcatttgatggtcgtggtaactacactttaggtattaaagaacaattgattttcccagaaatcgattttgataaggtaaaccgcactagaggtttagatattgttatcgtaactactgccaacactgatgaagaagctcgtgaacttttgactcaatttggtatgccgtttgcaagatagtggaggacattaatggctaaaacatcacaaaaaatcagaaatcgtcgtcctgctaagttctcttcacgcgaatatacacgttgcgagagatgtggtcgtccacactccgtataccgtaaattcggattatgccgtatttgcttaaaggaattagcacacaagggtcaaatccctggtcttaaaaaggctagttggtagtatacggttaggaggatagcttaaatggtcatgacagatccaatcgcagattacttgactagaatcagaaatgccaacatggcaaaacacgattcagttgaaattcctgcatcaaacattaaaaagtctatttcagaaattttgaaacgtgaaggcttcatccgtgattacgaagttgcagatgataacaagcaaggcgttatcaaggtattcttgaaatatggtccaaatggagaacgtgttatctcaggtttgaagcgtatttctaagccaggtcttagaaactacgttggcgctgaagacttacctaaagttcttaatggcttaggcattgccatcgtttctacttctgctggtgttattaccgacaaggaagcaagacaaaagaacgttggcggcgaagtaattgcctacatttggtaatactgacagaaaggagaacaatcaatgagccgaatcggtttaaagactattgaagtccctgacagtgtcactgttaccaaggaaggcgacaatattactgttaagggcccaaagggtgaattaactagatacttcgatccaaagattaagtttgaacaaaaagatggtgaaattaacttttcacgttcaagcgaaagcgacaaagcacttcacggtactgaaagagctaacttagcttcaatgatcgaaggtgtagttgacggttataagaagactttgaagttaatcggtgttggttaccgtgcacaagcacaaggcaacaagattactttaaatgttggttattcacacccagttgtattgactgcaccagaaggtgtttctgtaaaggcaacttcagcaactgatgtagaagttgaaggtgtttcaaagcaagatgttggtcaatttgcagctgaaatccgtgccgtacgtccaccagaaccttataagggtaaaggtattcgttatgttgatgaatacgtacgtcgcaaggaaggtaagactggtaagtaataagtagttatttttgaggtgaaattgtgatttctaaaccagataaaaacaagttacgcttaaagcgtcatagacgtattcgtggaaaaatttctggtactgctgagcgcccacgcttaagcatttttcgttcaaataaaaacatctacgctcaattaattgatgacgtagcgggtgttacgcttgcaagcgcctcaactttggatgaaaatgtatcagatgcaactaaagtagaacaagctgctgctgtaggtaaggcaattgctgaagctgcaaaggcaaaaaacatttctactgttgtattcgacagaagtggttacttataccacggccgtgttcaagcattagctgatgctgctcgtgaaaacggattagatttctaggaaaggagaattaacacatggcaaaccgcaatgattctcgtaacaatcgcagaaacaaagacgatatcgaagatcaattagtcgctgtcaaccgtattactaaggttgttaaaggtggccgtcgcatgagatttgctgctcttgttgttgttggcgacaagaaaggccgtgtaggttttggtactggtaaagctcaagaagtcccagaagcaatccgtaaggctgtagaagacggtaagaagaaaatgatcaatgtacctaaagttggtactactattcctcatgaagttattggtcactacggttcaggtaacattttattgaaacctgctgaagctggttctggtgttgctgctggtggtgccgtacgtatcgttatggatatggctggtatctcagacgtaacttcaaagtcacttggttcaaacactccaattaacgttgttcgtgcaactatcgatggtttgaagaagcttagaactagtgaagaagttgcaaaacttcgtcaacctgaaagagcttaagattagggagatcatagatgactgatttaaagattactttaattagaagtgttgctcaccgtctacctcaacaaagaaagatcgttaaagctcttggtttaggtagagtggatagtactgttgttcttccagacaacgctgctactcgtggtgcattattaaagattgctcacttaatctctgttgaagagattaacaaatagaatatcaaggaggtgccaaattaatgaagcttcatgaattacattctgctgaaggctcacgtcgcaatagaaaacgtgttggtcgtggtacttcaagtggttacggtaaaacttcaggccgtggtcaaaagggtcaattagctcgtcaaggcggtcatactcgtttaggttttgaaggtggtcaaatgccattattcagaactatgcctaagcgtggttttaagaacattaaccgcaaggaatatgcaattgtaaacttagatgatttaaacaagttagaagacggcagtgaagtaactgtagaatcacttaaagataatggcttagtaaagaaagaattgtcaggtgttaagttacttggcaagggcgaattaaaagttaagttaactgtaaaggttaataaagtttccgcatctgctaagcaagcagttgaagccgctggcggaactgttgaggtgatctaatgttttcgaccttgaagaacgccttcaaagataaagaaattagaaataagctctatttcacgctctttattcttttgctgtatcggatcggtgcaaacattaccgttcccggtgttaatgcgaaggcgatcacgcaggttgcgcaaactggtttagttccaatgctggatactgtatctggtggtggactagataactattcaatattttctttgggtgtttctccttatattacggctcagattgttatccagctgctacagatggatattgttcctacgttagtagaatggggaaaacaaggtgaagtaggtcgacgtaaaacaaatcaagtaactagatatttagcattagttgttgcttttatccagagtattggtattacgttaggctttaacgctttaactcaaatgggtttggtaaagaatcaaacaccacagacttatatagaaattgctattattatgactgctggaactatgttattaacatggttgggtgatgaaatcactgataagggtctaggtaatggtatctcagtaattatttttgctggtattattgcaagactaccaagtggtctatggcaaatttataaggaagaaattattaataatagtgctagtgatcgttggcaaggcattttgttcttcatcgcggttatagttgcaatccttatcgtaactcaatttgttacatgggttgaacaagctgatcgtcgtattccaattcaatatacgagaagagcgacgatgagtggttctgaaagttttctaccattaaaggttaatgtatctggagttattccggttatttttgccagttcatttattgttacaccggcaacgattttaatggcctttcaaagaacccagggcgatcaacaatggtttaaagtaatgaaccaaatctttagcttacaaactactcctggggtaattatctacactcttttaattatcttatttacattcttctacgctttcgtacaggtcaaccctgagaagctagcagaaaacttacaaaagcagggtgcttatattcctagtgtatggccaggaaaagatactcaggattatatttcaaagatgttgatgaaattatcaacagtaggttcattattcttgggcttagttgctttactgcctcaattggctactaacttttggaatctcccaagttccattggtttaggaggaacaagtcttttaattgtgattggggttgttctcgagttatctcgtcaaattaacggcttgttaatgaagagagaatatgttggattcatcagataggaacggataaatgattaacttaattcttttagggttaccaggtgctggtaaaggtacagcatcagagcgaatcgttgataaatatcacttaactcatatttcaactggggatatgtttagggaagcaatggctaacaagacgaaggttggtcttgaagctaagagttatatcgataagggtaatctagtacccgatgaagttactgcaaagttggttgaggaacgtttaagtcaacctgatattaaagaaggttttatcttagatggttttccaagaaccactgtacaagcagaacttttagatggtattacaaaacgtttggagaaacctttaacaaatgtcattgcgcttgaagttgacgaagacactttgattaagcgtttatcagcaagatacatgtgtaaaaattgtggagctacttacaacaagctttccaagcagccaaaagttgagggcacttgtgatcgctgtggtggccatgaattttatcaacgtgaagatgataaaccagaagttgttaagaatcgtcttgaagttaatgaaaagatgaatgcacctttgaaggacttttatcagaagaaaggcttgctcactgtaattaatggtgaacaaactccagaaaaagtctttgaagatattgatgcggtattgagtaataatcaatagaagaaaaatttgtataattttttatccgtgttataatttcaaagtatatgactgtttaattgcggaggaacaactttggcaaaagatgatgtcattgaagtagaaggtaaggtagttgataccttacctaatgctatgtttaaagttgaattggaaaatggagccacaattttagcacacgtttctggtaaaattaggatgcactacattcgtattttgccgggagaccgtgtgactgtggaattatctccatatgatttaactaaaggtagaattacgtatcggtttataaagtaatataacggagggaaacatgaaggttagaccatctgttaaaccaatgtgtgaacattgtaaagttatcaagagacatggccgtgtgatggtaatttgctcagcaaatccaaagcacaagcaacgtcaaggttagaaatagagggggtgtagtttatggctcgtattgctggtgttgacttaccaagagataaaagaatcgttatcgctttaacttacatttacggtatcggtgaagcaactgccaagaaaatttgtgctgatgctggagtatctgaagatattcgttcaaaggatttaactccagaagatcaagaaaagcttcgtgctgaagttgacaagtaccgtgttgaaggtgacttacgtcgtgaagtaagcatgaacattaagcgtttagttgatattggttcttaccgtggtattcgtcaccgccgtggacttccagttcgtggccaaaataccaagaacaatgctcgtactcgtaagggtactaagagaaatcgttaattttatttataaggaggtttattgatgcctgcaaagaaaacagcacgtaagcgtcgtgtgaagaagcatgttgaaagcggtgtagcacacattcactcaacgtttaataatactttagtcatgattactgacgttcaaggtaatgcagttgcttggtcttcagctggtgcattgggctttaagggtagtcgtaagtctactccatttgcagctcaaatggcagctgaagcagcagctaagagtgcaatggaccaaggcatgaaacatgtagaagtttcagttaaaggtcctggtgctggtcgtgaatctgctattagatcacttcaagcaactggtcttgaaattactgcaattcgtgacgttacgccagttcctcacaatggttccagaccaccaaaacgtcgtcgtgtttaattttgtccttgatataggacgtaacgttttgaaaggggcccagtaatgattgaatttgaaaaaccaaatattaccgttgttgaacaagaagattcttacggtaagtttgttgttgaaccacttgagcgaggctttggtactactttaggtaattctttaagaagagtattacttacttctattccaggtactggacttgtttatgtgcaaattgatggcgttttacacgagttctcaacagttcctggcgtcagagaagatgtaaccaagatcatcttgaacttgaagaaacttgaattaaagtctctttcagatgaacaaaaggttattgaattggacattgaaggtccagccacagtaactgctgatgatcttaaagttgatgcagacgttcaagtcttgaatccggatcaatatatttgtaccattgctgaaggtggacacttgcatatggaacttgccgtaaagaatggtagaggttatgttgctgcaagtgacaataagagtgatgacatgccaatcggagttatcccagttgactctttattctcaccaattaagaaggttaactaccaagttgaatcaactcgtgttggtaagagagatgactttgataagctcacttttgagatttggactgacggttcaatcaagcctaatgacgcccttagttttgctgctaaaattttagttgaacactttaaggtatttgaatcagcagatgcaaatgctaaattcagcgaagtaatggtggaaaaggaagacgataagaaggaaaagaagcttgagatgactatcgaagagcttgacctttctgttcgttcatataactgcctgaagcgtgctggcattaatactcttcaagagttaactgacaagacagaatcagatatgatgcgtgtacgtaacttaggacgtaaatcattggaagaagttaaaaataaattaaccgacttaggtctttcacttcgtcaagaagactaagcttaggtgaataaaggaggcaaatccatggcataccgtaaattaggtcgcgatagtgctcacagaaaagcaatgcttagagaaatgactactcaattaatcatgaacgaacgcattgttactactgaaactcgtgctaaagaagttcgtaagactgccgaaaagatgatcactttaggtaagcgcggcgatttagcagctagaagaaaggctgctgcatttgtacgtgacgaagttgcagatgttcacgaagaaaaagatgcagttgttgttaagtcagcattgcaaaagcttttcagtgatgtagcacctcgttacaaggaccgtaatggtggttacaccagaattttgaagttagccgttcctcgtaagggtgacgctgctccaatggttattcttgaattagtttaatttagagtaacacaacttaatacgtattaagaattatccatgaaagtgagaataagcgtaaagatgatggcgcaagcttagtctagcttagatgataaaaatcatccctcttcatgggtgattttttttgctctttttttctgttacaatatgctaataagcgatttaagaaaggaagtggaaaaatgccagtagatagtgctgttgaatttaaggatgtctcatttacctatcccgatactaaaaaagcgattcttgatcagattagttttaaaataaaaagaggttcctggacatctttgataggtcacaacggtagcggtaagtccacaatttctaaattaattaatgggttacttttgcctgattctgctaataattctagaatcactgttttaggaatgacgttaaatcaaaagacagtctgggatgttagggaaaaagtcggtattgtatttcagaatccagataatcagtttgttggagctactgttggcgatgatgttgcttttgggcttgagaatagagctgttcctcgggagcaaatggtaaaaatagtcagaaaagttttagcagacgttggaatgctggattatatagatgcagagccagctaatctttctggtggacaaaagcaaagagtagcaattgcaggtattcttgccgtagaaccgaaaattattattttagatgaatcaacttcgatgcttgatcctaaggggagagagcaggtgctaaaaattattaagcatttaaagaaagagaagaatttgacagttatttcgattacacatgacattgatgaggctaatatggctgataatgtgatcgtcttaaatgatggcaagattttagctcaaggaactccaacggaaatttttagtaaaactgaaatgttgcaagaaatagggctagacattccatttgtacaaaaattaataaataaattaaatgaagtgggaatttctgtacctaaaaatataaaaacgaaagatgagttgaaacaatatctatgtcaattaaatttgaaaaagtaaattatatctattctcccggaacttcaatggagaaaaaaggattagataatgtttcatttgaattaactgaaaatagttttgttgcattggtaggtcataccggtagtggtaagtcgactttgatgcagcattttaatgcattactgaagccgagttcaggaacaattgatattgctggttatcatattactgctcaaacaggaaataagaatttgaaaaagttacgcaagcgggttagtttggtttttcagtttcctgaagcacagctttttgaaaatactgtgcttgaagacattgaatttggtcctaaaaactttggagcaaccgatgatgaagctaaaagtaaagctttgaaatggttgaagcgagtaggattggataaatcgctagcaaataagtcgccatttgagttatctggaggacaaatgcggcgtgttgcaattgctggggtaatggctgatgaaccagaaattttatgcttagatgagccagcagcggggttagatcctaagtctcgtaaggaaatgatgaaattatttgttgactatcaaaaagcaggtcatactgtaatcttggttacgcataatatggatgatgtggccgaatatgcagatgatgttttagtgatggaacatggtaaattagttagacatgatgcgcctaaggcgatttttactaataaaaactggctagaaaagcactatttgagtgaaccaacggctagtctttttgcctcagatttgacgaactttaactttaaagataaaccgttaacactggatcagcttattaatgaaattaagaaaaatttgcgagggtagtttatgagtaagataattgtaggacgttatattccgggagattctcttatttataaaatggatcctcggagtaaattattagttaccatattatttatattggctatctttttagctaataattcaataacttatgcgattgtgaccattttttgttttttggctgtgatcgctacaggattaaatgcaaaagtattttgggatggcgttaagcctttgattggtttaattttctttacgtcgcttttgcaattgttttttatgactggtggtcatatttattggcattggtggattttttcattatctagctatggtttgattaatgcaatctatatttttattcgttttacattaattattttaatttcaacagtaatgacagttactacaatgccacttgaaattgctgatgcgatggaatggctgcttaagccgcttaagttgtttaaagtgccggtggataaaattgcgttagtaatttcaattgcgcttcgttttgtaccgactttgtttgatgagacttttaaaattatgaatgcgcaaagatcacgtggagcggacttcaatgacggtggtttaattcaacgtgctaaggcaattacgcccattttggttccgttgtttattcagtctttagaaacggcaattgatttatctacagcaatggaatcacgtggttatcgtagtagtgaaggacgaactaaatatcgcgttttaagttggtcaaaatatgatttaattgcattattttattttgtactgttagtcggattactattaacttttaggacatattagaaatatgacgacaagatataaaatgacgatggcttatgatggtcatctttttcatggctttcaacttcaaccagaccagcgaactgttcaggggacaattgaagatgcgttgaagaaaatgactaaggggcagcgtgtgattgtgcaggggtcaggtagaactgatgccggtgtacatgcggttggacaggtaattcattttgattatcctggtaaaactattccagccaatcgaatgattttggcaatgaattctatgatgccaaccgatattatctttgatgattgccaaattgttgatgagaattttcatgcgcgttattcgattaaggggaaatggtatcgctatcgtgttagtttagatcattttgttaatccatttaaacgtttttatacaggacattttccatatccactagatattgaaaagatgcaaattgcggcacaagatttgttgggaaaacatgactttactagttttgcggctagtggtggtcgaattgaagataaagtgcgaacaatttattatgtaaaaatcacagaggataaaaaagataatgaagtgatttttgacttcattggttcaggattcttatataatatggttcgaatcatggtagcagcgttgcttgagattgggaatgatcgtagaccagtgcatgatttgcagcgggtaatcgcggcaaaagatcgacaagaagtgagacaaacagctcatgccagcggtttatatctttatcatgttttttatgatgaagtaccacaaaaatatcgcttagatcagcatttataattgacattttgcctaaaaggacgtactctaatatagtatgtttgtccacgataggccccggaaacttattgttttcaaactgcaaataaacggaggaatttaaattgcgtactacaccattagcaaaatctagtgaaatcgaacgtaagtggtacattattgatgcaactgacgtaacccttggtcgtctttctgctgctgttgccactattttgagaggtaagaacaagcctcaatacacacctaatgttgatactggtgataacgttatcgttatcaacgcatcaaagattagattgactggtaaaaaggcttcagacaagttctactaccaccactcatcatggcgtggcggcttgaaggccgtttcatacggtgaattgcttgctaataacccagttaagatggttgaaatctcagttaagggtatgcttccaaagaacactcttggtcaccatgaattcatgaagatgcatgtttatgctggcgaagaccacaagcacgaagcacaaaagcctgaaaagttagatattaacaaattaatctaggaggttatataatggcacaacaagctgcatacacaggtactggtcgccgcaaggattcagttgcgcgtgttcgtttagtaccaggtaacggtaagatcactgttaacgataaagatgttgatcaatacattccattccctaacttggttaaggacttgaagcaaccattgacattaactgaaactgaaggtcaatacgacattcacgttaatgttaacggtggtggtttctcaggtcaagctggggctatccgtcttggtatcgctcgtgcacttcttgaagttgacccagacttccgtagtccacttaagaaggccggtttcttaacccgtgacccaagaatgaaggaaagaaagaagccaggtttgaagaaagcccgtaaagcttctcaattctcaaagcgttaatatttacgttcaaaaatgttgttatatcaacgttttggagacttcagttggtcacctatggtcacaatgctatagggattccaatagatttaaagcattcgcatcttgcgagtgctttttttctggcattaattccagatagtatttttcagtagttaagattgaatcgtgtcctaatcttctgctaacataagataaaggaatattattactgaataaaaaagaagcgtgggtatctcttaaaccatgaaatgtggttgaagggatgcctatttttttgagcaattcttttaacataccagactgtttaaagctgaaccagtcaaacaaatagccagaatctttttgagagatatccttcaatagatcgtaaatattcttaggaatagtcacactgcgtctagaatgtttagtttttaatttagtatcgtcagtagtagggctaattgatcgttttacttcaacgcaataatactgaccatcgtaatgcacatcctcaggcttaatacctaaaatttcaccacgtcttaaaccagtactaatctcaagtaataccattaagttaaattcattatctgtatgttcaagtaagtaatgttttaacttagttagatcagacattgatgaagctttattgcgtttaggtaattcttttccgtgtgctttaagtaaactagcaaaatcattgtaaatgtatcccttaacataagcatagcggagagcagttctaattttcttaagtaattcagttaccgttttcttagaatgtgttttgccatatttatctaagatactttgcatttgtacgtcatcaagcttaccaagtttagcggttggaaaaagattatcaattactttaccagctttaacataattatcaaaagttgcttttctaacgtcatgtacttttactgtttgaacgaataaataataaaagtccttgaataaagtgttttgctgggctattgcttgacctttagccttttgtagttcaagagtagtactccaaactttagcttctttttcagttttaaaactcttagttaagtaatcacgttttccgagactgtaaaatagtttgtgtaaggatgaatgattccttaaatttatttctttaaacattagaaaaaggagttcctttctcgtatgattggtttgaacaaaaaaaacacatacagaaagaagaactccttcatgaatgattttaccaaagattttgctcaagctctattcaatccagacaaaataaatgatttattgcgcaaagaactacaacaggctgttaataacttgctagaagctgaattgactgcctttctgggctatgatccctatgccagaaatggctggaatactggcaactctagaaatggtgcttatttccgcaaagttgatacgcaatttggcccaattgaagtgcaagtgcctcgggatcgcaacggtcaatttcatcagcacacgctgcctgactacaagcagcactcggatatcttggaaagcatgattatcaagctttactccaatggcgtgaccaccagggaaatagccgatctaattgaaaagatgtatggcagccattacagtccagctcaggtatcaaatatttccaagcagatgattccaaaggttgaggcttaccacaaacgcaagctaagcgacaagtttttctgcgtctatttggatgcgacataccttcctttgcgccgagaaacgtttgagcgtgaagcagtctatattgccattggcattaaacctaatggacataaggaagtcattgactactgcattgctcctagtgagaacattgaagtctggacagagatgcttcaaaacatgaagtccagaggcttgaagcaagttgaactctttctttctgatggtgttgttggcatgaaaacagccttggccaggacttatcctaaagctcattttcaacgctgtttggttcatgtcatgcgcaatatctgcgctaaagtacgcgtcgacgatcgtgaaaagatcatgaacgaattcaaacaggtgcatcaacagacaaacaaaaaagaagctgcagctgtcttgcacaaattctatgccaaatggaataaagcttatagccatgtcatcaaaggtttgaaggaaattgagcccgatctgctagtcttctacaattatcccaaacaaatcagagcttcaatttattcaaccaatatgattgaatcctttaacaacgtcatcaagcgtaaagctaagcctaaggcagaatttccaactgaacagtcgcttgatgcatttattggcatccaggcaatgagctacaatgaccgttatttcaatcgaattcataaaggctttggtcaggttcaggacaccttagaatcctactttgattaaataaataattaaaaaatcaatttacgagaaagatctatttacacaaaagatttgacagtttccgttttccatgttgatagattgttactctggctctatatgatgagccacgtttttcaatacttgccataaatttaatcgtcctttcaaaagaaaagccgattatcttaccagcaataaagttagcagataaccgactatttctcaaatctttttcaattttgtttctttaagatcgatgaaagcttcgatacttttaatggtaaagcgttctgtgtgttctcctagtttaaatcttttaaagtcaggatcagagcgaaatactttatcaaaagttttgggatcaataccaatatattttgaagcttcttcgcgagttaataatttagccactattattctcctgagattgtttagttaccaatattgagataaaatctaggtagtaggtaatctagtcattgcttttgtctctattagcatgactagtatttttttgcgattttatcttccaaattgcttcggataatttatcatcagtgattagatcatttttaactttattagtattgcttttagtaagttgcaacgggataattcgtcttttcaactgttcaaaagaatcaatgacttgattagcaatattacattcaagataaaaactaagtggatcataaggggtagtgatgtaaatggcacgcgcatttagataacgatcgtgataccttgcgggagccattttgtctatttcccaaggatccaaaagggtaagtagttgaccatagtcatagtcatttggtcgcaagtcattaattactatgaatttttgccctttgtattcttgaaagtgatcccgttgactacctgaaatacagaaatcttcaggatgttgtttttctaaaatttcccgtactaacttagtcttaccaattccggaaacaccatatatccagtagaccttacaactctgacctttgaagtcctttaaaaaccgttgatgctttttgtaagctaggatgtcttcaatatgatctaacagtgttttatgttttgccatctcaagaacaccgatttcttcttgaagttcttctttagtgattttttcatttgaataatcatcaataaagttttcaattgcttgtcgtgatggctttttgactttttgtctaatctcattgattctatctttaaaatcaaatgaagctactacttcttttggatcataatgatgtttactcttagcattagtagtttcatggatcagatagctatagccattgttaataatactgtgccatgcttcaatatattgttcatgatcattgaaaatcttagatactcttgaaatggttttagcatctttgaaatgaagcattacatgatagtgaggtcgaatcttttaacttatctttactaaatggtaaatgatctaaatcttgggtatacataaagttgtgagaacgtattatttttttcacaattaaagatttcctttctattcaacacgaactacatattaactttggggctagataacaagttcattattactttatttttgtttatcagatggaaagcaattgcaagaagcagcagatatattagccaaggctaaggtgcatctatctatggtgatattttcaccttaaatcaaactgcagcagctatggttaaagttgctcaaggaggtaataagggtaaagtattactgcaaatgaatgaagcttaagttaacatgaaataataaatacatttagataaagaaagaccctcaaagattctaaatttgaatttttgagcgtctttttagattgctaatcattttaaaggtacttgtattacatttactcctgctttaataaattcattaattacactgttttctacaaaagtatcagttattaataaatcaatatcttttattgttccaatagtaaaattagagaatttattgaacttgctatagtcggcaacaacaataaccttttgtgattgctgaataatagttttattaacttctgcttcttccataactggtgttgaaataccttggttaatgctaattcctgcgcaaccaataattgcatagttggcacgtaaagatagaaatgctttagttgccaaatcaccgctcatgattaatttatgatgtatttccccacctgttaagatcactttgcttttagtattttcaaaatttccagcataaccattgttagtaacaattattatatcctttgttaataaatgtggaattgcatcaaaggctatactactagagttaataaatactatatctccatcgtgaatatatctggctgcctcttttcctaagctttgcttaatgtaactaacgggctgagataatgggatttcttctggtgcaacaagggatatgacaccacgcttttttgaaatcttacccatttttgacaaataatcacagtctcgtcgaatagtcatttcagaaaccttcatctttttgcttaattcagaaatagaaatttcccttgtgtgatttagtaaatcaatgatttgcttgcgacgttttttaattacttgaattgaatttttcatttttaatgatctatttcacttcaataaatacttactaacgcgtggtgctagttaaatcgttttagttaataaaaaagtccaatcttgttagactcgacttgtaaatagtaataatagaaaagagtctgatctgattgaactgccttaagcttaagcgttttagccaccatttacaagttagttttaaagatttagtgataatttgtcggcactggtatcgtttgtatgcaccggctgagtttactcatcggcgaaatattgatcaaattaaaactacggacagtctgattttggctttacttatctggcaagctaagacaggaattgaatcacaaagaagattctgtgaatgtttcaattgtttatcacactcacgttttaatcggcgttcacgtcagctattgcaattgatttatcagatacggcaagaaatgaataaaaaggttgacctgaatggacagttcttgatcattgacagctttccggtacctgtttgccaaccaattcgaaactatcgtgctaaaatttttcgcggttatgccaacattggttataaggccaccaagaaaatttacttctatggtttcaaagttcatgccattgttagcgatgacggttacattcttgattatgtcgtaacaaaggcatcagttcatgatgccagggagacagttgaactgatagaaaatacccatccatctaattactatcttcttggcgacgaaggctatttaggcaaagaactgcatcaacagctaaaacaaatgggttacgaactttggacaccatatcgtaaaaatatgacaggagctaaaaagcacaatgatcatcaattgatggctattcgcagaacaattgaaagcgacttttcgcttctgacctattacaatgccgagaacaatcgagcacgtagtctgataggctttcaaagccggttggaaattgcaattttagcttataatttggcttattgtctagaaagatttaactagcaccacgcgtaaaaattataaactgtcttgaatattatcagctaagtagtcataaagcataccatgctttaattgcttagtatcaactcccaaagcttcagcaattgcataggcaaaggcccaagcggtagcaggaccacggcttgttaaaattttatgctctttatcagtaacggtgattttctctgaaaaatgagcacttggggcatcttttaagcattcttcttcaatgcctggataacaagtgaagtccgcatctgccaaaacaccatagcgagcaagagcacgtggagcagcacacattgcggcatcccacttgccagcttcatgacgcttaatcatcagatcacgtaatttttcattatcgcgtaagttagcagaaccagtcatgcctcctggaaaagcaaccaaatcataatctaataaactgtcatctacaactttgtcacaagtgatttcaatatgatggtcaccatctacttttttacttattaaacctaccatatcgcattcaacgttaagtctacgcaatacgtcaacaacgcttaaaccttcgacttcttcgcaaccgtctgcaaatactacagcaacttttgtcataaaatcatcctttctataactattttaattatctacttacattagatctaagtaaaatgaaagatctgctaatttgcttaaatgaagagtaggatgaggtgaaattggtatcttgtcttttttaggtgccagccataatgattttagattggcattttctgcaccttgaatttcttcatccagattagttccaattactaaaactgtgtctggatcaatatctggattgtctttcagaatcttaaagaaaatatttttgcttggcagcttgtccgtaaaatcatcggcgaaataagcattgtcaaatgaagaaagcaattctgtaggtgcaaggcgcggttcgatttgagtgcgcttttctttagcaagcaaaatcaaatgcagcttgccactgacttcatcaataaagtcgatggcgcccttgactaacctggtttgatccttcattgcatcatcaaaaacagttcgcgttttagaaagatcttcttttaaaaatgtagataaagctaaatcgatttgatcattgctagataaatttttaaattctttttctaagctagtgtagcgtagtcgctcagctggtccccagtctaccccataatgttttaaagtttgccgcagcgcagttttttctgctaatttttcatttaataaactgccttcgggaataaaaattaaagtttcaaatgtagccatgaataaacttcctttgtgttagttcctattagaattataatgaactagacaattttaggaaaggaattaaaaaatgacaatctggaccgtaattttcttattattaggtggtgttgcaggtggcttattatcgtcagtggcctcaatggcatcacttgcatcatacccagttttgctagcagtaggaattccaccagtatttgctaatgtaactaatgatgcggcgctaatttggactagcatcggttcaactgtatcttctactaaggagttaaaaggacattggaagcaagttttgttctataccatttttacagttgtgggatcaattttgggttgtattttgcttctatcttttcctccaaagatttttgaaaaagcagtaccattctttattgctttctcaggattgatgattattgtttctggtaaacaccatagtttaaatactaagacacagcctacttggcttaaaataatttattttctcgcacttttagtcatggggatgtatacaggttactttggtgcagctggtggagtcatcgtactagtacttttaacttacattaccaatgataaatttattgttattaacgctatcaaaaatgtgatttgtggttttgctaatttagtagccttgattatatttatgtttacctctcatatttatgggcttcaggcaattcctttggcaatcgggatgttcattggtggctatattgggccagctattttaagacgagtaccggaaaagccagttcgaattttcattgcaagcttggccttcattcaagccggttacttcttttatacggcatatctgcaataagtttggtacaatattaagcaatgaaaagggggctaaggttgatggcaacagaagtttatttggtacgtcatggtgaaacaatgtttaaccaattggacaaagttcagggttggtgcgattctcctctaaccgtgaaggggattaacgatctaaagagaaccgctaaggccttgagtcaagttcactttgataacatgtattcatcggatttgaagagagcaattgataccgttcacttgatgaaggatgctaatgtggtctcggatattggtaaaattaaaaagctgcctgaatttcgtgaggtcttctttggaacttttgaaggcgatgatattaaccagacttgggaacaagtagcactagccgcaggaattgaccatgaagatgatgtaactaagatcatcaatcaggtaggcttgcgcaaatttcgtgcagcaacaaaaaaggctgatccgcgtcatttagcggaaaatcaggatgagttagatgagcggatggtacgggcaattgacgttttgcgcgatttaactaaagatgaacaaagagttttgttagttagccatggtgactttattaaaactttgtccataaaatattggaataagagtaatggcaaaaacgatattgtttttccaaataatgggagcgttactcgtggaattttgcacgatgacggttcatttgaaattgttgattataatgtagatgctgaagagctataaaagtcctactgccgaagtagggccttttttggtacactgataacgaaaggaaaatattttatgaataaagatcatacaactaagcgttatgtcttcgtaactctactgaatgttgttattactattgctgaatttataggtggtattttttcaggttcattagcactgctttcagatgcatttcataatctgagtgatgttggtgcaattattttatcttttgtggcgcacctgattagtcgcaaaagtcgtaatcagtttaagacctttggttatgaaagagctgaaactttagccgcttttactaatggcgttatcttgatcgtgatcagtgtggttttgtttgttgaagcaattcaacgtttctggaagccggaacatattcacggtggcattatgctgattgtctcgattattgggctggctgccaatattatttcaatgctagcaatgcatagcgattccaaggctaatttgaatgtacggtcaacttttattcatatgttaagtgatgccttgtccagtgtagcggttgtaattggtgcgatcttcatttacttctggaatgtaacttggcttgacccagttttgactattttagtttcaatctttgttttgcatgaagcttatgaaaatacaatgaaagcagccaatgttttgatggaatctaatcctgatatcgacttgaatgaagtgaacaagattgttttatcgttccccatagttcaaaatatccatcatgtccatgtttggcgctacagcgatgactttattatgatggacgcgcatattaatgtagccccaggattaagagccgatgaattagagcagctataccaagatattggacaggagttacaaaaagagttaggtattaatcatattaccttacaagcagagtgcgagcgtggcagaaaagacaagatgatcgttccaggccacggtattaacgaagattaggtgaaagaatgtttaatgttaatatttttacagcgattattgtattgattatgggtatttatgacatgtcctatgcttttaataggcgtaagcaacctaccaataaaggcggcattagagcctttatggctttaggaattatcttcacgatcgcaggaattgttatgatcgttagagtattaatgaagtaaggaatcttagaatggctaaattagtattagttcgacatggcgaaagtgtggcaaatgctgccaatgtttatactggctggaacgatgttccgttgactaaaaaaggtgaagaacaagcagaaaaagctggtgaattgattaaaaccatttcggattttgctcccacccacattcatacttcagtcttatcccgtgcaattgtgacagcaaatatagtagccgatgtctgcaatttattatggctaccgatgactaagacctggcggctgaatgaacgccactacggcgctttaaggggccttaataaggacatttcacgtaaagtatttggtgtggaacaagttctattgtggcgacgtagttttgattcagttccacctaagcaggggtcgccaatgattgatcgccgttataagcattttgatcagcatttgatgccacgggcagaaagtttacatcaaactcagaaaagactcatgccatattattatgatcatatcgcatctcgattgatgaatggtgaagaccaactgatcgtagcccacggttcaagtttgcgtgctttgataaaaaagctagagcagattaatgatcatgacatcgtaaaactggaagttcctaatgcggaaccgattgtttatactatggatgatcacttaaagattattaacaaacaaattttacgtaaataatgttaaaaatgcaccttagtgcatttttttaatgctctaaatgaggttttacacatatctatggtaaaatctattatgatttctagtatatttagtttggagtattaggcatgcgtaaattatttttattacgaggtgcacctggctccggtaaatcttcttttattactcgccatcacttaaatccttatgcgatcagtcgtgatcaaattaggctactattggcggatttgacagtttactatcaagaggatgcggatgttttacaccaagtcattccgcggcacgtaactgtgcgtactgagcaaatggtggatcaccttgtagaacacaagatggaatatggggaaactgttattgtggatgggacgcatatcgttccaagtgcgattgaacattttaagccttgggtagacaagtatcactatgaatgctttgtagtagatctgatgcaacatactaccttagagagtttgcttaagcgtaatcagactagaatgcattacgattgggttaagcctgaagtggttaagcaaatgtatcgttcttatgaagcacatccagaagtaccatactgggcacataaagttgtgccaaatcagatggatcatgcgttgtcacagcgtgagacaaatttagatcgttatgctcatgtgattgcggttcctgacatggtagatgaagaagattttccacatgtgcatatctcgaacttttatttttcatttaatgacaagtttacagaaaagtatggaacttatcgaaatgtagtttcaattgctaaaactgaagatgaagcagttaagcagttcaagttgccatattttgtctttaagtttcatcacaagcactttttgatttcagcttatccaattcgaaatgagatgttggatccgatcagaaaggttaagggagtttggacatattcaactggtttgtataatgtagcggattttgtgaaagaatttccggaaaataaaaagcaacatgtgcatcagttcaacttaagtaagttagatccaacccgcttattacatatttggtaaaaaagacgtagttagaacattttatctaactacgtcttttgtgtaatttacttatattttgttttacttcaatttgccggccttagctaaaacttctttagccttttcaagtgaatggtgttcttcacgataacgcttgatgtcatagccatcaacatcggttaacttgctaagtctatcatcaaggtctttgaattctttttcaagatccttaatgacgccttcttcatcttcaacgtaaacatactcattttcatcagctttggcatcaatcttagcatcgtattcgccgacttttctagcatgtttcaaaatagatttaatatccttaatcgtttcatgttgtgcagtacggtgacgacgatcaggtactgaatcttcaattctagcgaagtggctttcagcatcactaattttctttgaaattctatctaatgcttttaattgtctttttgaatagtctgtcatgcttttttcatcctacgtaaactttaccatttgaatcctctctaccgaattcgccttcgttgtaggcctaatatttttgggatacaagaaaggacacttgaagttgtaaaaaaagtgtcagaaatttctttccgacacttaactatttgattatagctattaatacttaaatgctaaggcacccattggatcccatggcaataattgaattgggttatctttgccttcatcgtaagccttcttaagatcttctggtaagaatttcttgttgataactgcttggtaaacaaatgaattaaaccaagaatcactcattacgaagtaacccttaaagccaggtttttcaccccatgagttttcgatcttccatttagttggcttaccgtcaacgatatcaacaccggtaatcaccatggcatggtccatcatgctttcaccagaatcaagcatgtcggctttagacatagtgaagtcagcatcaaataattgatcacggcggtaaaggttagtatcaagaagtccagcacggcgttcagaatccttaactacgtttgaaccgaaccaaacaacttcgccactcttcaattgtttaatgattaagtccttcatttcatcaactttaaggtttaagtggcgaacttggcgaccgccttcaacgttacctaagtattcaactgagaataccttgtggaaaggtttgtcgttagttggagcattgatagttgagatatggtttgctaaatccatgccaacgtacttgtcaaagaattcctttggggtaatgtccctgtcaatatggtaattcttgtcatcatcgcggtattcgaagttgaacttctttggtggaacacccaatgaagtagccaaaatacggaagacatcgtttagcatttcttccttgcgagcttgtacttcatcttctgacttgccatcttgaactaatttacgtaactcaagaccatctttacgaagcaaagtatttaaagtgtcgtttaatgcacttgaattagtagcattagcagtttctggataaacactcttaggaacgataccatatttttcaataataccgcaaagcatgtcccattgaccgccgtcttgttgaggagtcgcaaataagaatgaaactttacgatcgcccaagtccttatcagcagttgcgatcacattttcaaagaaccagttagacttttcaaatttatcccagaagttagtgtaattttgagataattcgaagtcctttaacttaaatttcttttgtaatgggtgacgcatagtgtttaaagcactgaacatccagcagcgaccagactgcttttgatcggcagggttacctgtatcaatttcgattgagaaggttggatctaggtcgatcttagtttgtaagttttgactagctttgtagataccgttttcttgagcagcgtgactagccacatcaaaaacagggtggttagctaagtcttgttcaaatttattaatagtatcattgttgatttcttttaccataaaaaaaatcctcctttataagtacttaaattaattttatcttattcaaaatgagtcgtctaataatcttatcgattaaatggacgatgataccaaattttgtgaaattgaggatgctgggtgaagtagtcaatgatcataggatcaagcggccaaatgggtaagttagtttcttgagctaattgccaaactttttgcatttgtttttcaagcaaatccttactattaaattgtggattaataaaaaaatggttcattatccagacattactgtctttgcgagcgattttatctaaggtaacgctagataatagtatgtcttcttcattttttatagtgaaaatttggtgcgcatcttgcttattcataaaaaattcctttttaaaaaaataatctcatttttttgcgtaataaataatagagagctatttattttgtgttgactaaaaacattgtaaaatagataactgtcaaaataaaagataaatggagctttggaatgaaaacacgtggatttgaagtagtcaaaaagtatcaagatcaggaaattaatcttcctcgcagacagaccctagctagtgcaggctatgacatcgaagcggctgaagacattactatccctagcatttggcgactaaattttgtgcgaatttttaggttgattagaaatggacaccagctgtatgagcgcgactatgagatggcggatcagattttaaagccgttgttagtgccaactggacttaaagcttatatgccagaagatgaagtgttgattttagctaatcgttcatctaatacttttaagcgtaatctagctttgccaaatgggatcggcgttatcgatgcagattattacaataatcctaacaatgagggcgaaatttttgtacaaatgattaattatggcgtacggcccttgcacatcaagaagggagaccgtattgctcaaggcatttttatcaaatacttgaagaccgacgatgatgatccaattagtcgaaaaagagttagcggctttggatcaactaatgaaaagaagggtgattaatggctagagtaaaaacacaatataagtgtcgttcttgcggctatatttcggcaagctatttaggccgctgccctaactgtggtgcttggaatcaatttgaaaaagaaactgaagaagtgcaaaagcgttctactaaggcaactgctagtcgtttgattcagaagactggattaaatgaaccggtaaagctggataagattaaagctgaaaaagaagaacgaattgtcactaaatctgaggaattaaaccgcgttttaggtggtggtattgtgccaggctcactagttttaattggtggagatcccggaattggtaagtcaaccttgatgttacaaattatgagtgacttatctgaaaaatataaggtgctttacgtttcgggagaagaatcagctaaccaaatcaaattgcgggctgaccgactgggtgtaggtcaaagtaatatgctcttatatccagagactgacatgcatgatattcgcgaacaaatcaatgatgttaagcctgactttgttgtaatcgactccattcaaactatgaatgaaccaagtcttgattcgatgactggctctgcctcacaggttcgtgaagtaacaagtgaattaatgaaaattgccaagatggatgccattacagtttttgttatcggccacgttacaaaagagggtgcgattgctgggcctaagatcttggaacatatggtggataccgttctctattttgaaggggatgaacaccattcttaccgaattttgcattctgttaaaaaccgttttggagcagcaaacgaaattggaatgtttgaaatggttaatgaaggcttaagagaggtaactaatccatcatcaatttttctggaccaaagattacctaattctactggctctgctgtggtggtatcgcttgaaggaactaggccacttttagcagaaattcaggcttgggttactccgacagcttttggctatgctaaaaggaccacgtcaggtattagttttaacaaagcttcattgctgctagcggtgcttgaaaagcggggaaacttaatgttgcagaatcaagatgtctatttgactgcaactggtgggattaaattgaatgaaccagcaattgatttagcaattgccatggcagttgcatccagttataccgataaagaaatttcgccgacagattgttttgtaggcgaagtgggcttaactggtgaagttcgccgagttgataaaatcgatgcacgagtaaaagaagcggctaaagtagggtttaagcggatctttattccacggcataatatgtattctggattaaaagatcatggcattgaggtaattcccgtttcgagtattccccaagctttaaaattagtttttggctagcattaattgaattcttactatataacgagtaaactaagattgtttgaatttactattttttgaaagaggcatgaattttggctaaagaaaaaatccgtgtaagatatgcaccaagtccaactggtcacttgcacattggtaacgcacgtactgcactttttaactatttattcgctcgtcataacaagggtacgatggtcttgagaattgaagacaccgaccaaaagcgtaatgttaagggcggttctaagtctcaaatggaaaaccttcactggttaggaattgactgggatgaaggtcctgataagggtggcgactatggtccttatcgtcaatcagaaagaaaagaaatttaccaaaagtatattgatcaattgatcgatgaaggtaaagcatattactcatacaagactgaggaagaacttgaagcacaacgtgaagaacaacgtgctgcaggtgttgcacctcactatacttacgaatatgagggtatgactgctgatgaaattaagcaagctcaagatgaagcaaaggctaagggcttaaagccagttgttcgtatccacattccagaaatggaaacttattcatgggatgatattgttaagggacaccttgagtttgaatcagacactattggtggggatttcgttattcaaaagcgtgacggaatgccaacttacaactttgccgtagttatcgatgaccacttgatgaagatcactcacgtacttcgtggtgatgatcacgtttctaacacacctaagcaattagttgtttatgaggcacttggttgggaacctcctaagtttggtcatatgacattgatcattaattcagaaactggtaaaaaactttctaagcgtgacgaatcagttcttcaatttattgaacaatatcgtgatcttggttacttaccagaagctatgtttaacttcattactcttcttggttggtcaccaaagggtgaaaacgaaatctttaacaagcgtgaattcatcaagcaatttgaccctgcacgtttgtctaagtcacctgctgcttttgaccaaaagaaacttgaatggattaacaaccaatacatcaagaaggctgatcgcgacactttgcttgatttagctttgaacaacttgcaagaagcaagtcttgttgatgagcatccaacaccagaaaagatggaatgggttcgtcaattggttaacatctactcagtacaaatgtcatacactaagcaaattgtagacatggctaagattttctttgaagaagctaaggatctttcagacgaagaaatcgaagaaatcaagaatgatgatggccgtggtgtaattgaagaattcaagaagcaattagacctcatcccaagatttacttcagttcaaatcatgaacgctattcaagcaactcgtaaggctactggcatcaagggaagaaagctctttatgccaattagaattgctaccacgcgttcaatggttggacctggtattggcgaagcaatggagcttttaggtaaagaacgtgtattagaacacattgatttaaccttgaagcaaatgagtgctaataatctttaattagataaattgaaaaagaggctgcaaataaatgcagcttcttttttcatctgctaaaataaaaattagttattttgacagaagggacaagtgttagccgtgagagtttataatacactgacgcgtaaaaaagaagaatttaagccattagttccaggacatatcagcatgtatgtctgtggaccaacggtgtataactatattcacattggtaatgccagaagcgcaattgcttttgacaccattagacgctattttgaatataagggttatgacgttaagtatgtttctaactttactgatgttgatgacaagatgatcaacgaagcgagagctgaaaaaacgactgtacccaaattggctgaaaattttatcaatgcttttttggctgatacgacagcgctaaacattgagccggcgactttgcatccccgtgcaactcatgaaattaatgacattatcacttttgttaaaagcctaattgacaatggctatgcttatgaagtagacggcgatgtttattatcgtgccaaaaagtttaagcattacggtcagttaagtgatcaaaatattgaacagcttgaagagggtgcttcagagcacattaacgatacagaacaaagccgcaaagaagatccaatcgattttgctttgtggaaggcgcaaaaggaacccgatgaaattgcttgggattcaccatggggcaagggacggccaggctggcatattgaatgttctgtcatgagtaccaaatatttaggcgatacgatcgatattcatggtggtggtcaagaccttgaatttccgcaccatgagaatgaaattgcacaaagtgaagctaagaccgggaaaaagtttgttaattattggctgcataacggttttgtaactgtcggtaaagatcaggaaaagatgtctaaatcactgcacaatttcgtaacagtgcacgatattttaagggaagttgatccgcaagtactgcgcttcttcatggctagcgtacaatatcgccgccaaattaactattctgctgaaaatttagcacaagcagctacaattttagatcgctttaaaaatactttgactaatattaattaccgtctagaagatgatacagctagtgaagaatcagccgaattagcacaggcgattatggcaactaacgaaaaatttgaacaggcgatggacgatgactttaatgtccaaaatgctttaacagctatctatgatttgttgcctgtagttaatgccaacgctaatgctgctagagctgacaagcaagaattgcaaaagtttaaagagaaattagctagttggttattagtgtttggcgtggatactaataagctttgcgttaaaaatgctggctccaatgacgatgaaattgacgctttagttaaaaagcgtgatgaggctcgagcaaataaagattgggcaactagtgatcaaattcgtgatcaattaaaggaaatggggatcactattcaagataccccacaaggaactaggtggactcgtgactaaaataaaaaaactaacggaagaggatgttaatccggatactttaaatggacaaactttagcctatttaggggatgcagtgtatgaattaattattcgcagacacctagttaaaggcggtatcgttaaaccacaagtattgcagcgtgaagcgactcactatgtttcagctaaagcacaagctgcgttggtaactaagatgcaagatgaagaaatgttaacggatgatgaattagctgcttttcgtcgtggacgtaatgctaaaagtcatactaaggctaagaatactagtttgaaaacataccaattatcaacaggctttgaagcaatgattggttatcttgatttactggggaaaaatgatcgagtggcagacttaagcaagtggtgtattgatactgtagaagaggacgggctgaaaaattatgacttcaaataaagattttgtctttggacgccatgctggacttgattatttaaaaacacaaagtgccgacaagattaataaggtttttttacaacacggtgtacaagaagaatttgctaatcaagtttatagtttagctaaaaaaaagcgtttagttgttcaagacgtgcctaaaaataagcttgatcgtttggttgctggtggcaatcatcaaggtctagttttagcaatttctagctttgaatatgcagatttaaatcaattgctggacaagtatgatgcggaaggtaaagaaccatttttattaatgttggattctattgaagaccctcacaatctgggatcaattttgcgttcagccgatgctactggcgttgacgggatcattattcctaagcgtcacgcgactggcttaacttcggtagtagctaaaacatctacaggagcaattgattatgtgccagtagcgcgcgttaataatttagttcaaactactaaagaactgaagaaacgcggttactgggtctttggaactgatatggcaggtactgattatcgtgaatggaatgcccaaggcaagactgtactcgtaattggtaacgaaggtaaaggcatcgccccattacttaaaaagcagatggatcaaactattactttgccaatggttggtcacgtacaatccttaaatgctagtgtggcaaccggggtattgctttatcaagcttataacagtagaaatccattagtaaaataaacagaaagtagacaaaagtgtgagttttgtctacttttttagatacataaagctcatttctgtccattaaacatgtgttttcttctcaaactcaggggatagtctgtattctttgaggtggaggataaattgaatgattaatgaagagaagctgattaagaaagtacgggcaggagatgaccaagctttagaaaaattgtttcatttatatgagccgttagtaaattcaatcgtgaagcaattctatttgcatcattatgatcgtaaagactgggatcaagaggcaatgattgtttgttatgaagcagcactagttttctcgcctaaaaaggggaaatttagcagtttatataaaactaaattgtttaatcatgcacggaccttggtacgttacaatatggcacgtcgcaggcaaatctatagtcaatcgattccgctagaaaaggcggacattcaaggaagcgtgaatgaaccatgccgctctgaattatcgattccagttgatgagacttacaataattttgttaatagcttgtcacacgttgaattaattgcattattaaccataattggcgagataagtacagagtatgcgattgatcatctaaatattgaagcaatgaagctggtcagagctcgagcacgaactttacagaaaatgcggaaagtgcttttttgatagctgatcaaaagaaagtgcggtataataagtaatgtagaatattttaggaggtaatttaagatggcagacgaaattattaagactgcattgttagaccgtcacatgaaggaagcttttgactggagtgattcagatatgccagttagagatgccctttgggactactttatggaaaagaatggtagagataccatgaagacggaagaagatatgcttccatttttgaaagactcagacgataaaatcgaagccttcgttaacgaaaatcttaagaagtaaatccgactaaaaaacaatgttctacgcaccgtggtcacgcatagttttgaccactaagacagctaccttctccggtggctgtttttttatactaaaattaagaaagaattttaaagatgaaatatataattggcatagacataggaactactgcgactaaaggtgtgttgtatggcgaagatggaagtgaagtagctaaattggcaatttcctatccattgattcaggaagaagcgggacaggctgaagaagatccacagcttatttttgacgcggtacagaaaatgatttatcaattaagtcagaaagcatctggtcaaattttggcaatttcttggtctagtcagatgcacagcttaattggcttaggtgaaaataatgagttactgacaaacagcattacttgggcagataatcgtagtagtgatgtagtgcagcgggcaaaaaagtcgggctgggcaagaatgatttatcagcaaacggggatgccgccacatccgatggcgccagtgtataaattgctgtggcttaaagaagaacagccaacactttttgcacaagtaaaaaaatggattagtatcaaagaatatattatttggggcttaactggaaaaatattaactgatacaactatggctgctggcagtggaatgatgaatttaaaaacgctgacctgggatgaaaagatattggctcagattgggctagatcaagttcaattgccgacaattgctgatcaacaatctactgtgggtaaaattattccagaatatcgtgctaaattgggtttaaatgatgaaactcaaatcgttttgggcgcaagcgatgggtatttgtcaacgattggtgtcggcgttttggatgagaaagattttgcattgaatgttggcacttctggtgcggttagagtaattgcaccgaaggcaattgttgatcaaaagaatcgctttttctgttaccctgttgacgccaaacattatttgcttggcggccctgtaaataatggtggaattgtgttcgattgggccagaaaaacaatttttggcccagatgaaacggcagaggacgtcttaaatgtggcacaaactgctccggctggaagtaatggattgttgtttcatccttatcttggtggtgaacgagctccaatttggaatgctcaagcacgtggatcttttgttggcttgacgcgaaatcacactaaaccgcagatggctagaagtgttttggagggaattgtttttaacttgcttggcgcctctcaaggattgcttgatcaagtgggacagcctcaagctttacgtgttactggtggctttgtgcaaagtgattttgttagacaattaatcgcggacatttttaacttaccagtgattgtaattaaaaatgagcagtgtgttaccctagcagctatgtttttagctaaaactgcattagaagataagccagacctggaaaagattaaaaagcgtactgccgaaagccaagtttattttccaaatccccaaaatgtagcgatttatcaagaattgattctcgtttatcgaaaaattgagcatgaacttgaagcctcttatgaagatttggctcagtttcaagataagcatccacagaaatttgagtaaaacaaaaaagacgcattgcgtctttttttcatagattgattaactattaagcattttcaatatcttcaacaatctgatcaactgtcatacgattgtctttcaaaatttctttcaaaggtacttgatcagtatagacacgtttttggccgtagttgagtactttaatatccttgtcgccaaggtaggaagctactttttcaccaaaaccgccgtccaaaatattgtcttcaatagtaacaataactttgttttcttgagtcaatttgtctaaagcggcagtgtctaaaatattagcagaaactggatttactaagctagcacctgtcttttcagccacctttttacctagcatatcgtacatatcacctaacgctaaaacagcaacatctttacctggtttaatgtcgtacttgatttctgaatagtcaacagcagtaatttctttaccttcaggaacatctttggtaggcatcttaattgctacaggatgcttcttttgcttaatagcccattccatcattgccttttcttcggctaagttagttggagcaaggtagatccagttaggcaagttagaaatcattacttgatcaaacacacctaggtgagtcttacttgtgccagaaatgccaccaccagcaaccatcattacaactggtaaatcattagcggcaacatcgtgtgataattgatcaaatgcacgttgcaagaaggttgaattttcaaataaaactggagttgcaccttccttagccattccggcagcgaaggcaacggattcttgttcagcaattcctacatcatggtagttttcaggatatttgtttttaattctgtctaagccgaaaacgccgggaattgcggcattgatagccatgatcttctcaccattattgatgtgatcttcaagaacatcgagtgcaatagagctagcggtcggaccttcaggcattgctactgtcgtcttgtcagtctttaaatcgaatggcattacccagtggtgtgcttcttcgttgtcgattgcaggttgataacctttgcccttgagagtgttgatatgaagcaaaatagggtgatcaacatttttaactgctttaaaagcatcgatcattgattggatatcattaccatctgcgacataacggtaatcaaagcctattgcagtaaatggattttctttggtttcaccattagaatcacgtagtttctttaaagcagtaactaagccaccgacgttatcatcaattgacatttgattgtcgtttaccactacaactaagttatgcttttcaattgcagcgttgtttagcccttcataagcaaggccaccggtcattgaaccatcaccaattaaggccatgatgttttcatgtttgcccattaaatcgcgtgctttagccatcccagttgctaaggcaattgaggtagatgtgtgaccgacggcgtaatagtcatatgggctttcatcagggttgctatatggagttacatcttcatagtggtctggatcaagccaagcgagtgcacgtccagttaacattttgtgcgggtaagtttggtgggaaacatcccagacaatcttgtcctttggtgcatcaaaaacatagtgataagcaattgtagcttcaacgattcctaagtcgggacctaggtgaccaccttcagcggcatctttttctaagattagagtcctaatttcactggctaacttttccatttctggaagagataatttttttaaatcagcaggaccagaaattttattcaatagatattcaggatgtttatttattattatgtcctttctaacaagtagttacacttattatagataagcaaaaatcaaaataaaaatatttagttgtaattgagctcgattacttttagtaatgtaaatcagattattgacgtaggaagggacaacagtataaaatactaagtaagtatgtgtttttataaaagtttggaagtgagattatggcagtgaaaaaagcagccttagcctgcagtgtttgtgggtcacgcaactactcaatcaccgcaagtaagaatcgcactcagcgacttgaacttcaaaagttttgcaaacattgcggtaagaaaacattgcataaggaaacgaggtaaataaagctaatgattaagttttttaagagtgttggtcatgaaatgaaattggttaaatggccatccgcaaagcaaaatagacgtgatacagcaactgttattactagttcaattttatttgcggcatatttaggtgcacttgactggctcttcacttggttgactcaaagattaatgtaattgctagcataattagaaattatcagcgattcatgctataatattgacagctaaaagaaaacctctgtgggaggtttttttgtttacctaaaatttaaggagaaaaatatggtcgaaacaacacaaaagaaatggtacgttttgcatacttattcaggctatgaagacaaggttaagtcagacttgttgtcacgtgcacaaagcatggggatgcaagactacattttccgtgtaatggttccagaagaagaaaaagtagaaaccgttcgcggcaagaaacaagaaattgaagaaaagattttcccaggatatgttttagttgaaatggtaatgactgatgaaagttggttcatcgttagaaacacacctaatgtaactgggttcgttggctcacacggtggtggctctaagccatcaccacttcttgatgaagaagtaacgcgtttgcttaagaatcaaggtcaacctgctaagaaaccagtagttaactttgatattggcgaatcagtaactattactgaaggtgcatttaatggcatggtaggtaagattactgatattcaaccagataagtacaaattatacgtatcagttgacatgtttggtcgtgcgactactgctgaacttgattatgatcaagttaagaagcttgacgaaaacgaataatatttagaatttttagttgtaattgtacccaaacgatgttattctaatacggtacgtttattattgtgggaggagaaaaaaggaaaattctccattttaaccgcatcacggaatcaaggaggttttgaccgtggcaaagaaagttattaacgtagttaagttacaaatcccagctggcgctgctaccccagcacctccagttggtcctgcattgggtcaagctggtattaacattgttggttttactaaggacttcaatgctagaaccgctgaccaaaagggcatgattatccctgtagttattactgtatatgaagatcgttcattcgaattcattactaagactccaccagcaccagttcttttaaagcaagctgctaagatccaaaaggcttctggtgaacctaataccaagaaggttggtaaggtaaccaaggaccaagttaaggaaattgccgagactaagatgaaagaccttaacgctgctgatattgaagctgctatgcgcatggttgaaggtaccgctagaagtatgggtatcgaagtcgaagactaatcctgttatttaggtaacaaattaggtgggagagttaagagaagctcgtttgaccacatatacaaggaggaaatcacatgccaaagcatggtaagaaatatttagatgctgccaagaaggtagactcaaataaattatactcagtagcagaagctatgaaacttgttaaggaaacttcatacgcaaactttgatgctactgttgatgtagcttacaacttaagcgtagatcctaagcaagctgaccaacaaattcgtggttctatcgttttaccaaatggtaccggtaagacccaaaccgttgtagtatttgctgaaggcccacaagctgatcaagctaaggctgcaggtgctgactttgttggctcagatgacttggtagaaaagatccaaggcggctggttagactttgacgttgtagtagctactccaatgatgatggctaaggtaggtcgtttaggtcgtattcttggacctaagggcttaatgcctaaccctaagactggtactgttaccatggatatcgaaaaggctgttaagaatgttaaggctggtcaagttgaataccgtgttgaccgccaagcagctattcacactcctattggtaaggtatcattcactgaagaccaattagttgaaaactttgacgcattacgcgacgttatcttacgtgctcgtccagcttcagctaagggtcaatacattaagagtgttgctgtttcagcaacctttggcccagggatcaagcttgatccattaaacttggactaatttaaaatagactattaaaagcctcgctattgcgaggcttttttctattcattgacctattattttcgaacatggtatcataaattgaacttacaaatctatatattaaggataatgtcatgaaaaagcattctattggaaaactagtcattatgttggtgctaatgctagcttttgttacgggctgtgctaataatggttctaaaatcactattgttggttcaagtgcaatgcagcttttagcagaacaagcaggtaatgattatcgcttaagtcatcaagacagcaacattgtcgtgcagggtggaggatcaggtacaggattgagccaggttcaagctggtgcagtccagattggaacctctgatgtttttgccgaaacacaaaagggaattgatgccaagaaacttcgtgattataaaattgcagtagttggtattgttccaattgttaataagggtgtaggtgtgaaaaatgtttcgcaaaagcaattgaaacagatcttcactggtaaattaacgaattggaagcaactaggtggcaaaaatgaagccataactgtgatcaatcgttctaagggaagtggtactagatctgctttcgaagatataattttacaaggaacaaaaccagttaagtcgcaagaacaggactctaacggtgccgttaaaaagattgttaattcaacgcctggtacgattagttacttgtcctttccttatgctcatgataccaatattcaaaagttgagtattaatggggtaaagccaactaacaaaaatattactactaataagtggaatatttggtgttatgagcacatgtacactaagggtaagcccaacaaacaaactaaagcgtttattaattatatgttaggtgaaaaagtacaaaaagatcttgtacctaagattgggtacctcagtatcaatgaaatgaaagtaactcgtaatagcaagaatcaagttacacaaataggaaaatagttcatggataagaaggataaattaaaggaagttgttgatcaagcaattgctagtcaacacgttccacacgttaaattaaaaaagatgggtccgactagtgttgatattgataaattaaccaagccatctaaagagactcatcaagaatattggggcaagggtttaacttacttggcaattgttttgattattgtcttagttgtctcaattatcggctttgtcggctatcacggcttggctacttttgtcagcgatcatgttaatgtcattcactttttgacttcaactgattgggacccgggtgagggcaagaatcatgttggtgctgcggtaatgatcgttacttcgttcttagtaactcttttagcagcattggtagccaccccgtttgcaattgcaatagctctttatatgactgaatattcatctaaaaagggtgccaatttcttacagtcagtgactgaattattagttggaattccgtctgtagtttatggtttcttgggattaactatcatcgtgcctgtgattagaaaactatttggtggaacaggtttttgtattttagcagctacgttggtgttgttcgttatggttttaccaacaatcacatcattaacggttgatagcttaaaggctgtaccaagtcattttagaaaagcttcaatggccttaggttctacgcattggcagactatttatcatgttgttttgcgagttgctacgcctagaattttgacggcggtaatcttcggaatggcaagggccttcggtgaagctttagccgtacaaatggttatcggtaatgccgtcttgatgccatacaatttggtcagtccatcagcaacattaactagccaattaactagtcaaatgggaaatacggtcatgggaactttgccaaacaatgcattatggtcattagcattattgcttttaattatgtctttggtatttaatttcctagttaagttaattggaaagaagggacaaaagtaatatggatgcaaaaaagaaagataaattagctacggcgattatctatattttggtaggaattgttgtattaattttggccggtatcctaggtgatatcttgattacaggtattccacatttgtcctggcgctttttgagttctgaagcctcatcataccaagctggtggtggggtacgtgatcaacttttcaattcaatttatttgttaattttgactactattatctccttaccaattgctttaggagcagcaatttatctagcagaatatgctaaagataattgggtgaccaatttgattagaactacaattcaaattcttagttcattaccatcaattgtagttggcttattgggttatttattgtttgtagttcaatttggctttggtttttcaattatttctggtgctttagctttgaccttttttaatttgccaattttaactagcaatattgaagaagcaatcaagggcgtcccacaagatcaacgtgaagcaggattggctttaggattatctaattggaaaactattcgcgggattgttttacccgctgctcttcccggaattttaactggaattattttgagtgcgggccgaatcttcggggaagctgccgctttgatctatacagcgggacaaagtggatcaacagtcaattatgcggactggaatccatttagtccaactagtccacttaatgtaatgcggccagccgaaacattggcggtccacatttggaaagtaaatactgaaggaattattcctgatgccacgattgtttcagcagctacttcagcgctcttggttattgtggtaatcgtatttaatttaggtgcacgttatttaggcaataaattgtaccgcaagttaactgcagctaagtaggtgaaataatgcaagatttaaaacctagctatattaaaacttttgcaaatgatgatttggaattatcaactgaagatttaagtgttctttatggcggtaaggtacaaaaattatttgatgccagtcttcaatttaaaaagaacacgattacagctttgatcggtgcttcgggttcaggtaaatcaacatttttacgttcattaaatcgaatgaatgatcgagtagcaactgttaacggaaaaatctggtttcatggtttagatgtgaataagcctaatatcaatgtttatgaattaagaaaaaacattggcatggtttttcagcggcctaatccatttcctaaatcaattagagaaaatattgtttatgctttgaaggcagatggacataaggatcgggcagaacttgatcgagttgtagaagaaagtttgcgtgcggctgctttatgggatgaagttaaagataagctggataaaagtgcattagcattgtcgggtggtcaacaacagcgtttatgcattgctcgtgctttagctgttaagccagaaattttactactggacgaacctgccagcgctttggatcctgtttctacttctaaactggaagatacccttaagcagttgaggagtaagtatactatgattatggtaactcacaacatgcagcaagcctcaagaattagtgattatactgcattcttccatttaggacatgcaattgaatataattcaacggcagagatctttactaatcctaagggtaagattactgaaaactatattcagggaagttttggataaaatgacaacaataatttcagcaaaagatgtacatctaagttatggcaattatgaagcactgcacgggatcagtcttgattttaagaaaaaagaattaacagctttgatcggtccaagtggttgtggtaaatctacttttttacgctgtcttaatcgaatgaacgatgacatcgaaaacattaatatcacaggtgaaatcaagtttgaaggccaagatatctataattctaaaatggatttggtcagtctacgtaaagaagtcggcatggtttttcaacagccaaccccattcccgttttccgtatatgacaatgtggcttatggcttaaaaattgctggtgttaaagacaaagagctaattgatcagcgggtagaagagagtcttaagcaagctgctatttggaaagaaacaaaggacaatttaactagaaacgctcaagcattttcaggaggacagcagcaaagaatttgtattgctcgtgcgttggctgttagacctaaagttgttttattagatgagcccacaagtgcgcttgacccaatttcaagtagtgagattgaagagacactgatggaactaaagcatcagtatacttttattatggtgactcacaatttgcagcaagcaggacgaatttctgatcagaccgcctttttgatgaatggcgatttgattgaagctggtccaactgaagaaatgtttattgcacctaagaaacaaatcacaagtgattatcttaacggtcgttttggttaaaattttgaggtaaaaagatgcacgaaatatttttggatgaactgaaaaaattaaatacacaatttatggaaatgggtgtcctcgtcaacgatgatattgaccatgctacccgtgcttttgttgatcatgataaaaagactgcgcagtcaatggttgatgatgaagaaaagattcctacagaatcaattaatattcaaaagcaagccttaaaattaatggccttgcagcaaccggtagctactgattttagagttgttatcagtattttaaaggccactactgacttggagcgaattggtgaaaatgctatgagtattgctctggaaacaatcagagtaaaaggtaatcctcgtattccagaagttgaagaaattatttctaatatgacacataatgtgcgacatatgttaattcaagttttaactgcttacgtgcaagatgatgaaaaaatggcacgtgaagtggctagtcgtgatagcatgattgaccacgactatgtaagagctcgtcaattgatcgttgatggaattgaagatgatccttcgcgtgcaatggcttcatcaagctattttgtagttacccgtttacttgaacgaatcggtgaccacattgttaacttggctagctgggtggtttataaaactacgggtgaactagaagaactatctaattcaactgaaagtgaaacgatttaaataaagtaccgtaaaaagcggtgctttttttgtaataaaaaacagttgatacgcgtggtgctagttaaatcgttctagacaatatgccatattataagctaaaatagctatttctagccgctgttgaaagcctactggacttcttgctcgattattctcagcgttgtaataactaagcaaagaaaagtcgctttcaatgctttttctaattgccatcatcgcttactattgcgtggaccttgaagccataataatagactttcttggttgctttataaccaatatcagctacgccccgaaagatcttgacacgataattgcaaacaggctggcaaactggcactgggaaactatcaataatcaaaaattctccagctgtctttacttcttgattccaagcctgacggatacaacgaattagaggcaagagcattcgagctcgacggttaaaacgagaatgagataagccaacgaagaatttacagaatcttcgttgagattcaattccaatttcagtttgccaaatgagcatcgctaagatagaactatcaggaagcttggtctgatcaacatttttacgatgtttaagtccatcaggcgcataaagcttatatagcgagcgacaaatcacatttaaccgattaaaactaacttgtaaatggtgagaaaaacgcttaagcttgagatagttcaattagatcagactcttttctatttaaattacctacaacttttattaactaaaacgatttaactagcaccacgcgtataattaatgaatatttcaaaaactgtattggcgttataccaaacaattattggtgaaaaacagaaacgcttaatcaagacagtagatgcttatttggacattaactacggtgataaagtttatcagataattgatcaagttaaggaacgtaatattccaattttgtcttttggggatatagcagatcaaaacaatacttactcaaactacactgtttttggcaatgatcaagttgacgagatggtggataaaattaatgaaatcatcaataaccaaaataaataaaattatcttttgcattttacagcaaagcttgctataataattaactgtaaattctacctaagactcgggtggcatgacgcctcaaaatcccgccgaggccagaagatgatgaagatttttatgctccatgtctttcggcatggagtttttgcttttttaaggccttatagaatttatcaatgtgatcatggaggtgaaataatttgagtaaagctgctattgctgaaaaagaaaagttcgttgatgcatttgctgaagaacttaaagctgctaaggcaatcttggtaattaactaccttggtttgactgttgaagaagttactaacatgcgtaaggaacttcgtgataacgatgttaagatgaaggttatcaagaacacctacttaagacgtgctgctgctaaggctggtatcgaaggtcttgatgatacttttgttggaccaactgctgttatctacactgataacgctgatgacgttactgaacctgcacgtatcgtttctaagtacgaagatgactttgacgttatcgaaattaagggtggtatgcttgaaggtaagttgacttctaaggatgaaatcaaggaacttgctgctatcccaggccgcgaaggtttgctttcaatgcttgtttctgtattacaagctcctgtacgcgactttgcatatgctgttaaggctgttgctgaatctaaggatgaagactcagctgaataataaagaaatttatatttaatatctaaattctaatttttcggaggatacttaaatggctttagatactgataagattattgaagaattgaagggtgctaccatccttgaattgaacgaccttgtaaaggctattgaagacgaatttgacgttactgctgctgctccagttgctgctgcaggtgctgcagacgcaggtgctgctaagtcagaattcgacgttgaattgactgaagcaggtcaagaaaaggttaaggttattaaggcagttcgtgacattactggtcttggccttaaggactcaaaggaccttgttgatggtgctcctaagaacgttaaggaaggcgtttcagaagacgaagctaacgacatcaaggctaagcttgaagaagttggtgctactgtaacccttaaatagttacagcccaactgggcaactatgaataagctctttgctatgtgcgaagagcttatttttttgtataattaaatttatgatgaaagatatagaaagaagactaacgccatatcaatgggtaatggccattttagctattatttcgatttttttgattattttagattttgctgcggttattaatattgatgaaccgactagtaaatggttctggatcaatagtgcaattgtagtatattttgcaattgattattttcgtggcttacatgcagcagaagacaagaaactatatttcaaaactcacatttatgacttgctgagtattattccaatggggttattgtttatcagcttaaatatttttaatttatctgggctggtatcagatttgcggcatttgcgtttgattcgattagctggtttgatgggaaaattacgtaatatttttcatactaatggcctactctatgtaatcttttttacaattacatttttgttggtaggagcggaagcattcgcaatcactgaacatgtaacgctggatactgctttttggtgggtcatttcaacagcttctactgtcggttatgatgcaatttttggcaaaacaattccaccgcatagtattgtaggaaaattcgttacattagtaatgatgcttttaggaattggaatagttggtatgttaacgtcatcgattacttcgtatttgatgaggagaacgaatggcgcgaatacgttaaaaacgcatgataatattcaattaattttgaaaaagcttgataatttagaaaagcaaaacaaggatttggctgatcaaaacaaaaagatgcaagcacagattaatgaattgaaagatgtacagaatacaacggagctgcataagataaaagaatggtttgagaaaaagaaaggttagttaaaatgagtgaagaaaaaaatcaaatgtattttgcgactgatcctactgccaagcatgatcaacatgttgttgattatcatgtggataatattgatttgaaattcacaacagacgcaggtgtcttttctaaaatgagggttgattatggctcaggcgtattgatcaaggcaatgaaagatgttgtttttcctaaggataatatcttggatgttggtaccggttatggtccgattggtttatttgcggctaagttttggcctgatcaaactgtagatatggttgatgtaaatgagcgtggattaagcttggcaaagcagaatgcacaagttaatcacatagataatgtaaatatctattcctctgattgttatgaacatgtggataatgataaaaagtttggtctaatattaacaaatccgcctattagagcaggaaaaaaagtggttaatgagattttactgggagcaaatgagcatttggttaatggcggtatcttattagtagttattcagaaaaagcagggagaacctagtgcgcgtaagctgatgaccaatacatatggtaattgtgaaattttaacaagagataaaggctattatatcttaaaatcaactaagaaataactaaataaaaaatgcttgaaagtactattaaataagcattagactttataaaagtgctttcaaaactggatttatcctcgtataataatcttgtaaatatcaagagtatgtgaagaggataattattatgaaaaaggcttggaaatacattgttgcagtattgattgtaattgttggtgtgtttatgttaggtatgatttccggtgataacgagactgctgctccagctggaattgctgcattatacttgatcttgtcaggaatctttttctaccacaactttagaaatcgtaacattgaaccattgtaaaaagtaagcagctagtcgcaaatagctgcttttttgatacaataaataaaaacgatgaattgagaagtgataaaatgctgtctggcgaagataaaaggaaatacatgcaattagccattgaccaggcaaaagaagctgaaaagcaaggagaggtgccgataggggcagttgttgttgatcctgatggccgcgtagttggtactggatataacaggcgtgaacttgatgaagatgctacccaacatgcagaaatgattgcgattaaagaagcttgcagtaagttaggcatgtggcgcttaattgactgcagcttattcgtgactttggaaccatgcccgatgtgtgcaggggcaattattaattctagaataaaagacgtttatttcggtgcacttgatccaaaagccggagcttgtggatcagttgtggatttatttagcgtagaaaaatttaatcatcatccgcatgcaattcgtggactgtatcgtgatcaatgtgcacaaatgctaaaagattttttcagagcgattcgtgagaaacaaaaagcagctaaattagctcaaaaagaagtataaaatcagtaatttttaaaacaagatgctggtaatatttactgaaatacgttaacatagttgttgggcaatgtttgacctctgaattgtgtcaggaccggaaggtagcagcactaaggttgttcaggcatgtgccttttttgttagaatattaacagctcttagctcttcgagagctaggagcttttttacttaggaaagagaatttatggcttatcaagcgctatatcgtaagtggcggccgcggacttttgacagtgtgattggtcaagaagcgattaccgataccttaaaaaatgcgattaaacgtggtaaggtttcccatgcgtttcttttcgcaggaccccgcggaactggtaaaacatcttgtgctaagatttttgctaaggcattgaattgtactaatttgcaagatggcgaaccatgcaatgagtgtgctaactgtattgcagctgatcaaggttcaatgccagatatcatggaaattgatgccgcttcaaataatggggttgatgaaattcgtgaaattcgcgataaggtaaaatatgctccaacggaaggtaaatacaaggtatatatcatcgacgaagttcatatgttgtcgatgggagcttttaatgctttgctgaagacattagaagagccaccagagcatgtagtatttattttagcaacgactgaattgcaaaaagtgcctgcgacaattatttctagaacgcagcgctataattttaagcgaatttccaaagaagaccttgagaagagaatgaaatacattcttgatcaagaaaatattaaatatgaagataaagctttagcagtcattgctcaagtagccgatggtgggatgcgggatgctcttagcattttggatcaactgttgagttacgagaaggaaagcgtcaactatgatgatgctttgcagattacaggctttgcagatcgagaaaatattgaaaaaattcttttagctttgttaaatcaggatgcaggtcaagccttgcagtttacacaagatgagttggctaaaggagctagttcaaaaaacattttagatgaaatcatcgatctaactactaagagtttattaatcgtcaaaaccgatgaaaataaacaggaaacttttttaacaaaagactttattgaaaaaataaagagcgtttctacagatagttattatcgattgattaatttggctaataatgccttgaatgatttacgctatactaatcagcaacagataccactggaagtgttcttagtagaagcaagtagtactgcaccagtgcagacaagcgctgccccagctaagacaacaccagctcaacctgcacaaggtaatactgatttgcaggctgaactagcagcgctgaagaagcaagtcgttgatttaacacaaaaacttagtgaagtatccaataagccaagtttatcaacaaatcaggtatttcacttggatactgcggtacctaaagtggctcctaagcctgctgttaaaccaaaagagaagcaaactaaaaagccggttagaaaagtcaaaaaaactacggcagaaaatcgcaaacaagtatatcatgttcttgaaaatgctactcgaaacgatttagagacaattaagaatgtctggcctgatttacaatctgttttagctgtctctgaaaaagcactgcttgatgtattagaaccagtggctgctagtcctaaacaagttgtcatgaaatgcaaatatactttatggtttgaaaatgcgagcgcagataatgatctgttagggcgcttaacagactatattgaaaagtttgctaaacattcttacggcattgttttggtgccagataacgattggctggcagttagaaaagaatttgttgaaagccataaggatgagctacttgctaagaaaaagcaacagattgagattcaagaaaaaaagtcagatgaaccagaagttgatccagaagtgattaataaggcaaaggatctttttggggatgcagtcaatattaaagactaaagtactatgagcaatgattataatattaaagttttaaataaagaaacaacattacagatcttactagaagatcataattctttgattcgttttggagatggagaattagatttaattagaggagcaagtattccgtatcaagattatcaaccggaattagctggttcgctaaaagagctcctgttagaaggcagcaatcgccgtttattagtaggattatctgatgtttttgaaaagttagatcgctataatgattattgccgtaatttttatcaaaatagtttcttcccgaataatcatgacttgttaagagaagttgaattgcaatacaatgtatacgtttctactttcttttcacggccatatattgatttagtagataaaagtcacgctaaagattattttgctaaaatgaaacagctttggcaggatcatgatcttttaattgtagaaggtaaatatagtcgctcaggcgaaggcatgacttgttttctaatgctagatcaattagtagactcatttgtccgccaactaatgcatatagtcgcaaaaaagttattgaagatgaaattattaaaaatgcagctaataggttgattttactgatgttaggtcctactgcaaaagtgattgtggctgatttgatagctcagcttaataatcaaatgattgatatagggcacatcgattcagaatatgaatggatgaaaatgggcgtaactaataaggtgaagataccgcataagcatactgctgagtttaattttgatgataaacaagttaaactagagaaagacgacaattttgataagcagattattagtataatagaataataaaggagaaaaattatgagtagaagacctaattttggtggtatgggcatgggcggcatgaacatgcaacaaatgatgaagcaagctaagaagttgcaagcacaaatggcagaagagcaggaaaacattactgctcaagaatttactggtaagtctgccgatgatttagtagtagctacctttactggtgaccgcaagttgaaggacatcaagattgataaggaagcaattgatccagacgacccagatatgttacaagatttggtaattgatgcggttaacaagggcttgaccaaaattgatgaggcaactcaggcaagcttaggtaaatacacgaaaggtttgatgtaattgcaatatccattaccaattgctcatttaattgatgcttatatgaagctacctggaatcggtgaaaaaacggcgactcggttggctttttatacgatggatatgcctgatcaggatgtcgatgattttgctaagtctttagttcaagtaaaaaaagacattcatcaatgtccgatctgtggcaatattaccgaaaaagatgtctgtgatatttgctctaatcctaatcgcgatcaaacaactattatggtagttgaacaaccaaaggatttgatggcttttgaggaaatgggcgaatatgacggactttatcacgtgcttcatggtgttctttcaccaatggatggaattggaccagaagagatcaatatcaagtctttaattacgcgtttgcaaaaaaatgatgctgttaaagaagtgattttggcgcttaattcaactccagaaggcgaatcaactgcgatgtatatcagcaaattaattaagccagctggtattaaggtaaccagattggccgctggtttgtcagttggtagtgacattgaatatgctaattccattactttaaagcgcgcagtgcaaggaagaacggcattataatggctaataaaaagcaagcaaagatcaaagcaatgggtgatcaaaagttggtagccgagattgaaaagctacaaaatcaaattgcattagagcaagatctcgatcaaacaactttagatttatccgaagataattatgtgcaaaatcgaatcttaaaggcaaagtatacttttttgtataatgaagctcgtcatcgaggcacaagatttagtggtattactaatgctattacccagtagaaaaagaccgaatattggtctttttttattttgaataaataaaaaatagtaggactgttaatctctatgaaacttctgtagaatagacatatggaggattttatgagaggttattttgttagttttgaaggccctgatggcgccgggaaaagtacagttttaaaagaagtattgaaccaaattggttcagagcttaagacacaatatcttgtgacgcgtgaaccaggcggttcaaaaattgcagaaaaaattcgcgacattattttagatcctgctaacgacaagatggacaataagaccgaagcgcttttatatgctgcatcacgtagtcagcatgtggaggagattattcgtccagctttaaaggaaggcaaagtcgtattttcagatcgctatgtcgatagttctttagcttatcaaggagcgggacgtgatttaggaattcaggaagttaagcaaattaatgattttgcaacggataaattagatcctgatcttacttttttcttagatcttgatcctgaagtagggttaaaacgaattgaaaagctgcgtccgggtcaggaagatcgtttggaacaagagaatcttgcctttcataaaaaggtttatgccggttttctcaaggtaaaagagacgtatcctgaacgcttcgtaactgttgatgctacgcagccaattgatcaggtagttgctcaagttattgcaacattaaagcaaagaatgccagagttattttaaggattgatttagatgaagttagtaattgcaattgtgcaaaaagaagactctaatgatttacaacgggcctttgttcaaaatgattttcgtgctactaagttagcaacttcaggtggttttttaagtcaaggaaatactacctttttagtaggttgtgatgacgataaagtagacgatgtattaaagattattaaggaacagtcccgagcaagagaggaaattgcaacaccacatatggtttcaactgggtatgaaattacacagcctttgaaagtgacagtcggtggtgcaacttgttttgttgttccagttgatgagtttaaacgcttctgatgattgatcttagtaatgttgggaaaaagcaaacccaatttttaaaaagagcatatgaccaaaaaaagttagctcatagttatctttttgttgatagcgatgaggcacgggcattgaatactgcatactggctagcttgtttgtttaattgtactggtgaaaataagccggatggcagctgtcaaaattgtcggcaaattttgtcaggtaaccacccagatgtattgctagtagcgcctgatggaaaacaggctctagggattgatcaaattcgtcccttaaaagaagaattagccaaaagcccagttgaaagtactcgccgtttcttctttattaatgaagcacaaaagttaactttagctgcagcaaacggtttattaaacttactagaagaaccagtagcgccagtagttacgattttgattactaacaatagtgatcagattttaccaacggtgcgttcacggacccagatcattaattttgacaatggtgagagggctagtggtaggactgcagtcttactggagaatggtttttcaaaagcagagattgaggaactgggtaatcttgataaatggaatcaggcaattaaatatttttatcaagaaatgctggaacacaacagcttagcacttgtcagtgcacataagctagctgctgatgctaagctagtgtcagagcagggttacatcttgcttcagttaaaattattggccgagcaagatttgcgtaatcctgctaaaagaataatggcggcgacaatgcttaagaatttaattgaaatagacaaaatgcgtttgagtaacgtaaatttacaaaatgcgttagattatctcgccttaaaatggaagtaggtgtttagattggatccatattcaaaactgaaaaagattgaagaaacaacagaaaatatgaccaagacgattgccagcttggaaaatgatattttagaaacattaaaagaaaacacggagttgaaggtagaaaatcaattactccatgagaagctggacaagttaacggcaaatcagcctgcacctgagactaaaacgcagagtggcttggaatcattgaagaagatttatgattcagggtaccacatttgcaatatgtactatggctcgcatcgtgatccaagtgcagattgtatgttttgtcttgatattttggacaattttggcgaaaaaaagggcaagaaaaaggacggtagataatgaaacgtcaaagcagttatgcaaaagatgaaggaaagctttatttagtgccaactccgattggtaacttggaagatattactattcgcgctaaaaaagttttaaccgatgcagattatgtagccgcagaagatacaagaactagtgggattttactggaaaaaattggggttcataataaaatgatctcttttcataagtataattccaaggagcgggcgccggaattgatcaagttgatgaaggaaggtgctgtgattgccgagattagtgacgcggggatgcccgtgatttctgacccaggttatgtattagtacaagaatgcattaagcatgatattccggttgtaccacttcctggtccaaatgctttttcaactgctttgattgcttccggttttaatcagccatttacttattatggctttttaccaagaaaatcatcggaacagaagacctattttgcacagatgcgcgataatagagcaacatcaattttttatgaagccccgcatcgtctagcaaaaaacctcaaaacattggctagtgtgctgccaaaagatcgtcaaattgtagctgcacgtgaactgaccaaaatccacgaagagtttatccggggtagtgtggaagaagttacgaattacttcaatgagaatgctccacgcggggaatttgtgattctagtttcacctaatacagaagcgcctcagcaactatcttggacagaattaattgacttagttaatgacttggttgaaaaaggtgaatccaagaaagatgcaattaaacaggtagccaagcagcatcatgtttctaagaatgaattgtatgatcaatatcaccaggattaattatgaagtataccgaagaatatcaaattgaatttaaagattgtgacgaaaatcggcgtttaaaattaccagcactagttgagttaatgatgcaggtttctgagcatcaattaagtcaaggtggtgctgggactgatgacttggttaagcgtggtctaggctgggtcgttactcaatatcattttgagattaaagacctgcctaaaccgggtgatcaagttattctaagtactgaagctagcggctataatcgtttttttgagtatcgtgattttggcgttagtacgcaagacggtaagccattagtgactgtaaaaagccagtgggtaatgctcgacttgaagaagcggcatatggtgccaaccgatactaaaatgatggaagattggggtgcaccactacttaaaaagatgccacgttttccaagattgcgtccgcaaaccgaatacgagcaaaagcgttcataccgtgcgcgttacgatgacttagatactaatcatcatgtaactaatagtcattatttcagttggtttgttgatatgttggatcgtaactttttaaaagaacatattgttacagcaattgatattaaatttgataaagaagttcattatggtgagagtataaattcttgcatggacttggttcaatatgatattgttattacatctcatgcaattgaagcagaagatgggacagttaaggccgtctgtgaattaagttggcgtgagatatagtaacaacatgacgctattagttgtttttatttaggggaggaatcggtcaaatgaatacaaagaaaattttacgaacggatttacagcaactagtctttttaggtattgttgttgcaatgaaaattattctaagtcagttttcttttggtccagtaatggttaaagtgggactgggtttcattgggagtgtgctattaggatatctctttggtccgctctggggaacaattggcggtggaattagtgatttaatttcatctgcactttttggcgatcaaggtggctttttcattggttttactttaacagcaatggcaggcccatttatctacgccctgtttttatataataagccagttaaaatttggcggattattgcttctactattctggtgactgtaattgtcaatattggcatgaataccttatggctacatattatgtatggtatcaatttcaatgcggctttgatccaacgtttacctaaggagatgatcgttccttggattcaaatggttatcagctactttgttttacaagccgtttctcgtgttaaaataaaaaagtgatttaaagcgaaaagagaaaaatgtataaaatgaaaattttaagtgtttcgacagctactaatcatttgagcgtggccttgaatgatggtcaacaaattattgttgagaaaaatgaacgagatgagcgtaatcatagcgaacatcttgatccttggattgatgaaatcttaaaagataatgatttaagcttaaaagatattgatcgttttgcagttgctattgggccaggttcttatactggactaagaattggaatcactactgttaagatgtttgccagcattttagataaagaggttgtaggaatctcaactttacaagctttggctaaaggcgttcaagaagacgctttggtaattactggtttagatgcaagaaatgacaattattttgcggccggttatttaagcggtgctgtaccagagaatgtcattccagacggtcattacaatatcgacgttttaattaaggcgattcaagattatgcggccaagcatgaagttaagaaaattgtttttgtgggctcaggtcttgaaaagcaagatgaaaaatttaaagctttgaatattccatatgtttatggaactgaagaagagaatgtcatccatgctgggctaattggacaattagctgaaaatgcggttccagttgatccagataaattattgccacgttacttgcgtcgaactcaggctgaagtagactggcataaaaagacaggcaaaccattcgagccagatagtcattatgttgaagaagtttaatcaatttttccatcaacagttaaatcggattgatatgagttttaccccgtttattgcgaatgtaaacggtaagagactacaaattatgcaagctacagatgacaatattcctgacctgcttgtattagaggagcaagtttattcaggtcggacaccgtggaataagttttcatttgagcgagaactagagaagcggcataattgtctttatttggtagtgtattatgaatcgatgctagttgcatttattggtgcgcgttttactccagaagagacgcatattactaatattgcagtagcgccggcttttcaaaatatgcatattggtcgttacttaatgcaattgattattgatcgggcgcgtgaaaatgacagtgattgcgttagtctagaggtaagagtagataatgagattgcccaaaagctatatcgttccttaggttttgaaggtaccttcattcgtaaaaactattaccatgatactcataccgatgctatgaacatggttttatggttaaaaccacatcagattaaaagaaagaagtttacgttttgagtgaaaaaaatgttcgcattttagcttatgagagttcttgtgatgaaacttccactgctgtcattaaaaatgggcgtgagattgaaagcttaatcgtagcaacgcagattaagagtcatcaacgctttggtggtgtagtccctgaagttgctagtcgtcatcatattgaagtggttagtcagattactaaagaagctttggctgaagctaattgtacttggaaagatatcgatgcaattgctgtgacttatggccctggcttagttggtgctcttttaattggtgtaagtgcagctaaggctgcttcaatggcaacgggtattcctttgattggtgttgatcatattatggggcacattatggcagctcaactaaaagatgagattgaatatccagctcttgcattacaggtttcaggtggacatactgaaatagttttacttaaggatcctgttcattttgaaattatcggtgatacgcgcgatgatgctactggcgaagcatacgataagattggtcgtgttcttggggtaaactatccagcaggtaaaactatcgatgcctgggctcatgaaggcaaggatacctttaacttcccacgagcaatgatggaagatgatgactatgacttctcattctcaggtttaaagtcagcttttattaacacttgtcatcatgctgatcagattcatgaaaagttgaataagtatgatctggctgcaagttttcaagcagcagtaattgatgttttggctcataaaacaattcgcgcaattaagcaatataagcccaagacctttatcatgggtggtggggtagctgccaaccatggcttacgtgatcgcatgagtgcagaaattgctaagttgcctaaagcagaccaacctaaggtgattttgccagatattaagttgtgtggtgataatgctgcaatgattggggctgctgcgtataatctttataataatggtcaatttgcggatttgactttgaatgctgatccatcacttgaattgccatatgctaagagcatgttgaattaaatagaataactttttaaatcaaatacctagaacgattatttctaggtatttttttctactaaggcatggtccttaggatcttttaaatctaaggcgattgattcgtaagcgtcaaataaaatagtgtacttaaaaaccgtcccagttactgttatactgagacggttatttaagttcttttatttacaatttatctggatcttctcttgccacggtaaataagcttcaagggtttccgaatccagaatctcttcattcggtaatttctgaagcaaataattcaagtacttttcaggatcaaggccatttctcttggcagtttcaattaagcttagaataaagccacttgcagtagcaccctcaaaactttgagaaaataaccaattcttccggcccatgacgagtgattttacagcgcgttcagccttattgttagataattctaaattgccatcaagcaagacatgctcaaaagtagcttgatgcttgagggtataattaatggctcttcccaatttagagcctggcaaaacggtgattttatttttctcacaccagttgaagaactcttgcatcagaggcttgagctttgcttgtcttagctggtaacgttcttgtttgctcaaattctcccaggtttgttctaagtaaaacatgcgattgcagtagttgagtcctttttgggcaagggacttttcagaagcctgttgtggtacggcttcgtgaaactttcttctaacatgagcccagcagccaactaaagttgctttcggcaattgctcataagcctgccacatatcacagtgcaaataaccgggatagtttcctaaaaagtttaaggcaaccttgcaactccgggaaggatcatgatgatagagtgtaatcccgtattgatcatgtttgcctgaaaggaagacccaatagtaagtcttgattgttttactttctaagactgtataataagtttcatcggcatgtaaaattggccgcattaacagcttttgcttaagcagatcatacactggtttaaagtagtattgactgcttttcaaatcccaataatttaacatctgtcttgaaacttctagtcccatcttcttccagtcgctttcttgacgatagtccggcaccttcatttcatatttttgataaagtgaatgagcgatgagtgaagctgaacctagaccatggtttaggggagctttaggtactgcagctttaatgatcttgtcgctaagatttctttgactgcaatatttacatttgtaagcatgttggatatggtctaaccttttaagttgagctgggataaacaataattcttggcgaactgactgcttgcctatctcaatcagttcatgatgacaatcaggacaatgcttgtcgcctaattcatggtgaacctcttcagctggaagggcagctagtaagtcagcacgctttcgtttgtgagcttgtcttttataagtaatagtctgaacggcggcgtcggggacgttctccgtcatcttgagcatcaggttcatcaaagagacttgtttgtccatttaaaggcatttgttctgaagatttgccataacgtttttgcgttaagtaagctacttgttcacggaggagcttaatttcatcagttaagttttgaatagtagttgcttgttgtgcaataatcttttccaaattttcttgtgacatgagttaaacttcctcctaaatttattagttaaaagaatatcaaaaaagcgtgcgatgtcaagtgttagtagaattcgcacgctttcgtgttctttatttttggattgattgcgaagcccttcattagccagtcgacctgctcagaagataaagcttgaacttcattttgattcctgggccagttcaattttccattttcaaatcttttgtagagcagccaaaaaccttgtccgtcccaataaagggctttgaagcggtccttgcttccgccgcaaaagaggaagactttgccgctaaaaggatcaagttcaaactgttctttgactaaagttgctagtccatcaatgcctttacgcagatccgtcttgccgcaaacgatatagacttgccctaagtcactgagcttaatcatggcaagactttctcaagcagcttattcataatttcagggtctaagctgctgtaaaaattcagctctaagtcattcttctttaaactaagcaacagattattgcgtggtggacgagccttcttaggtttagaagaacggccaagtgccacaatgggttgttgtttttcgatcatattcttaacctccattaaattgatgagattagaatacctgaaaaatacggactaaaaaagatactcggttatatgacgcttacattgattccttgcctgcgttacaaattctaaagtattcgctagaaccatctgcgatatatggccccatgtgacgcgtgtcatcgcctgtttttctttcgatatgaattacccgggcaccactatctgcgagcattctggtacaagtagggcctgagaggacgtgggtaaagtcaataacgagcatcccgcttaaaggataaggtttgtttttatctaaatgactgttttttgcttctagctcagcataattaggttctgtcatagttgtgcgctttctattttaaaaagaaaaagctgttcgaagtgaacagctttttgatgagaataaattaattattcacccttgataacttcagtacgtggattcttaggaccttgagccttagaaattacgccttcttcagtcaatttttcgatttgatctggatcataaccaagtgaagctaaaatttccttgttgttttcaccaagatctggagcacgcttgtagttagaaagtgagaatggcaaaccaatagtcttgaacttaccacggttaccaccttggtcgatggttacgatagtaccatccttgttcaagtccgggccattttcaatttcgtgccagtcaagaactggacctacaggaataccagcagcaccaagcttcttagttaattcatacttgtcgtattgcttagtgtagctttcaattaatgggtaaatttcttccttgtgtaattgacggttgtgccagccatcaaagcgaggattagtttcccaacctttagccttgtaagtccgaccgataacttggccaccttcagtgttctcagcacgaggaattgccttgccccatttccagttagggtaaacagcgtagtgaggaagggcacctaagttgtctaacatgatttggttacgcaacttgatacggcagaggttcaatacagcgtcttgcattgactggtaaacaaaaataccttcactggtgtgttcacgttgaagaagggcagctaagataccaatagtaaggtgcatccctgggtttgagtcacctaaagtagcagctgattgagtaggaacgttggctttgccttcgttccaaccagtagcagaagcagcaccaccagcagattgagcaactggttcaaaggccttaacgttttcaaaacgtgaatcttcattgaagcccttcaatgatgcatagatcaatcttgggttcaaagcgtgaagcttttcccaaccaaaaccgttacgatcagctgaacctggtgcaatgttttcaacaaagacatcagccttcttagccaagtcgtacataatctttttaccttcatcagtcttgatgttcaaagtcaaagacttcttgttggcgttcaattgcaagtagtaaagactccatgaatcttgaatatcaagtaattcatttctagtagggtccccagtgttagtacgttcaatcttaataacttcagcaccaagccatgctaaaagttgagtacatgatggaccttattgaacttgtgtccagtcaacaactttaataccttttaaaggtgcatattcattttcttcagtcgtgattaattgtccttatcttcaagttgtgctaaatctaattctgggtttaagttaccaatgtgaccagattccttacccattgattcaggaatttgagcatcaataattgaaggattacctgattcgtaggccttttcaagagcatccttcatttcagcgtagttacttacacggtagctgtcaccaccaaaggccttagcgatttcagcatagtgagcattgtggcttaaaacagtaggtcctaattggtctttaactgggttacggtcaccattgtagataccaccattgttaatgatgacaacggtaacaggtaagtggtaacggcagataatttccatttccattccgtccaaaccaaaggctgagtcaccatgaagtgagatgactttcttaccagtttcaacagctgcagcaatggcataacctaggccgacacccattacgccccaagtaccagtatcaagacggtgacgaggcttttgcataccgattaagttacgaccaatgtccaaagtgttggcaccctcacttacgatgtaagtgtcagggtgcttttgcatcaagttattgataggttcaattgcactgtagaagcctaaagttggcttagcttcagaatcagcgattcttttagcaaatttttcattgttagcttcacaggcattcttaattgaatctagccagtcttgaggggccttaacgttagctttttcaaggggtgcgtttaatttttgtaaaacagaagtaatgtcaccttgtaatggggcatcgatctttctgtttgaatcaaattctgttgcgtcaatatcgacttgaacaaacttagcgtcttcattaaacaatggagcctcaccatttgaaagcatccaattaagccgagcaccgattaataagactacatcggcttgacctaaagtaaatgaacgagctgaagcagctgatgatggtgagtcatctggtacaacgcctttagccattgacatcggcaaaaatggaataccagtcttagtaactaattctctgacttctgcttcacttctagcataagctgagcccttacctaggataatagcagggtgtttagcgttctttaataattcaacagcacggtcaattgcatcatctgatggcaattgctttggagctggatcgactacttcatagatatgagcgtctgacttttgtgcaactgtgtcggcaactgttgcagcaggaaggtcaaggtaaacaccaccaggccgaccgctcatagcagttctaacggcacgagcaactgctaagcccatgtcttcagcacggtcaacacgataagctgctttacataaaggtttagcaacattgtattgatcaagtccttcatagtctccacggtcgaggtcgatgatatgacgatctgatgaacctgagatcataatcattgggaagcaattcttagtggcttctgctaaagcagttaaaccatttaagaaaccaggagcagaaactgttaaggctacaccaggcttgccggtaagaaaaccagcagcagcggctgcgtctacagctgcatcttctcttctaaattcataaaacttcataccctttaattcagctaaacgggcaaagtcagtaactggaatgccgacaccaccatgcatgttgtttaaaccgtttgcttgtaaagcatcgattaaaagtgcagcaccagtaagtgatacatcttgtgtcacgaaaaaaaattctttcaaaaaatccccaaatgcttatgtttatgcatttcaaaaccaagatacacctcttgaattgtatatacaggcacaattgaataataaggtacgttattttaatatgcgcatataaaaataagcaagtcctaatatattagaacttacttattatacttttattcaaaattgtccatttcttcgattgccttttcccaggcagaatttgcttcatctaatttctgttgtacatcagaaagctgttcttgcagtggccccaatttatcaaagcttgaagcaatttctggattggccatttcggtttggatttcttgctctcgttcttcaagctgttcaatttgtttttctgcattatcaattgcacgctgcaactttctcttttgagaatcacgttgcttttgctcttggtaagaaagtttttgctggctaatttgtttgcttggctcgacttctgtctcagcggcactattttcagccatagctgcttgttttgccttctcatcaagataataagaataattgccatcgtagactttagcatgcccatcgcgaactaaaacaatcttattagctagttgattgataaagtaacggtcgtgggaaacaaagagcagggtaccatcaaagtcttttaaagctttttctagtacttcttttgcttcgatatctaagtggttagttggttcatccatcagtaagaagttatcatgttcaagtgataaaacagttaaagttaaccgtgctttttgtccaccagatagttgacctacggtcttatcaatgtctttagctgtgaataaaaagctggctaagattgaccgtacatcgcgttcaggcatggtcttatgacgatccccaacagtatccaatacagttttagatggatctagtctttgtaattcttggtcgtaataaccaatctcaagggatgcgccatacttaattgagccactcttgggcgttaattgcttcataatagtcttaagcagggtagatttaccgattccatttggtccaatgatcgcgacgcgatctcctttattaatctggaaggaaatatctttaaccatggttttatcgggataaccaatcgtcaaatcgttgaaaattaatacttccttgccagaaggatgatcgcttgaaaaatgaatccgtaccttatttttatgtttaggtggagtaatccgctcaattttttctagttttttacgccgactttgtgcacgcttagtggtagttgctcgaaccaagtttttttggataaattcttcatcttttttgatttcagcttgttgcttttcataagcggcttcttggtccttatcacgttgctcgcgctgcatgacataggctgaatagttgcccttaaaagcagttaatttaccaaattctagttcaaaaatttgggctgctaaatgatctaagaaatattggtcgtgggaaaccacgaggattgcaccactgtaattctttaaaaatccttccaaccaatctagggtatctaaatctaagtagttagttggctcgtccaataacaacagagcaggtttgcgcaaaagcaacttaacaaaagctaaccgtgttttttcaccaccggataaactaccaatcttcttttgccaagtgtcttcaggaaacttaaagccattcaagatacttttaatatcagattgataagtataaccgcctttttgttcaaagttgaattgcttttgatcgtattgcttaagcaattcttgatcttcaggatgatctgcaattttttcttgtagttggactaagctttttctttcccttattaaaggagcgaaaacggtttccatttcatcccaaatggttttattttcatctaatgcattttcctgagcgatataaccaacatcaatgcctttattaactgtaaattcgccgtgagttggttcttgctcacctgtcattatttttaacagggtagtcttaccaaccccgttaggaccaactaagccgattctggcattggaatcgattgaaaaattaacatttttgaataatgtgttggccccaaattgttgttctaaatcgtgtccttgtgcaataatcataatttttcacctaaccactattctaccatatagcgcaaattgtttgtttttaagttaaatatgtgaaaaaatgatgatttgtgaaaaagatacttgcataagtactatcatagcaggtatgatagtagtgcttgattgtacattcacaaacatttaagtttggagggttcctatatggaaaaaataaaaatcccaaaagcaacggcaaaaagattaccattatattaccgttatttgattattttaaatgaagaaggcaaagataaggtttcttcaactgagctgtcagaggcagttcaagtagatagtgcttcaattagaagagacttttcatattttggtgcgttgggaaaacgtggctatggatatgatgtaaagaatttattgagcttcttcaagaaaattttgaatcaagatactttaactaatgttgctttaataggtgtaggtaatctgggacgggcgctgcttaattacaactttaagcgcagtaataatattcgaatttcctgtgcttttgatatcaataaggagattactggtcgtatcttaagtggtgtccctgtttatgacatggacgacttaaagcaacaactaagtgatcaacagattacaattgcaattttgacagttccttcaacagctgctcagaaaaccacagatgaaatggttgatgcgggtgtaaagggaattatgaactttactccgattcgtttatcagctccagctgatgtgcgagtacaaaatgtagacttagcaaccgaattgcaaacgttgatctatttcttagatagtgacaaagaaaactaaatttgagtaaaagaaacatactaacctagtgttggatcatgaatcgacggattcacgatctggcactttttattttgtctaaaatagaaagtgaagataaagcaaatcaagtcttcagctttttagacacttgatgtcgtaaaagaaacggactgctttaccacctattcttaagtctcttcgaagtctgtgggcacttagatgccgtgtttagaaaattagaattaataggttgataaagaggtttatcttcacagcggaggttatattatggaatcacaaattattttcggtattgatgttagcagtaaatcttccacagtttgtgtggttaatgtccggatcaaacaaggcgaatcttttagaatctctaatgattcctttggctatcaaaaactttatgagcaactgaaccaatatttgataactcctttagttgttttcgaagctactggtgtttattctctaagcctgcaagctttcttagaggattatcatattaagtatttgaagcttaatccgcttaaagcgaaaaagctaatggacaataatttacgccataataaaactgataaggtagatgcttatcgcctggctttaattcaatttaatgccccgcaaaagctgcgtgatccacagcccagagagtatcatgaacttcagaatgccagtcgctattatgaagaacttactaggagtatagttactactaaaaatcaattgcaccgcaacctccaatccactttcccacaaattgaagaaatactgtctcatccatctggcagaatttattgggcgcttgttagtcttttcccacatgctggatatgttctagaaaagaatgagacacaggtaactcaaatgcttaattctatttctggaataggacaacaaagggcacggtacttaaccacaagattatacgcttttgctagagaagcttatccttatgattccaaagatagtattatcgttagagctattcaaaggaacatttctaatttattttcactccagcaagaacgcgactatgtaattaactacatggaaaagctggctaaagcagtaaacgctcgtgctttatccatctatttgagtatcccaggggttgctagaattacagcagtgagattagtagcagagctcggtgatctaagacggtttagcacttcagctcaaattgatgcgtttgttggcattgatccaggaaggtaccaatctggtgaaaaagacagttctcttggcattaccaagcatggcaatcatattgccagaaaaatactttatcgagttattactcaaatggagacggtaaaggctacgcagccttgccatataactgattattatgacaagaaaaaacgatcttcaaatagacaaggctataagaaaatcgccattgcatcagtccataaactgatacgcacaatgtttgctcttatcaaacatgatcaattatatgattacaacatagccaccgaaaataaaagactttagctgaaatcaaataatcaacttaagtataagcaacctatggaaaaactacaagtattcataggcttatttgtggtactttcgctttttcttaaatttaaactcttatttgctttaaccttattcgcatcattaaaacaagtaaatttattttcttaaatcattgataatacttgactttgggtagaaaaaagccgattttcggctttttttcatgcagttgtttcacttttgattaatttgacaggcaaaatataattcttttggcgcaatttttcgtcgggattggaaattcgggtaagcaataacttaaccaataaagttgcaatatcatgaattggctgagcaattgtggatagttccgaatggtaagtttgaatttgctttgttccgtcaaaaccaatcacttttaattccttaggcactttaatgcctaatttttttgcttcttgtaaaactaacactgcagttaaatcatctgtgcagacgacgccatcaggctgatcattgactaacatatcatgaattttcatatttttaatgttggaagaatcagaaaaagcaactgaacgaatgtgggctgaaaagtgacattcctttgcttcatcaagataagctgctagtcgttcgtcagtcggattaccttttctgtgttcattgcccagaaagtaaattttgtgacaaccagcttgaaccaagtcatgtactgccaacttgatgccttgataattatcacaactaacaattggaacattatcagatagctttcggtcgaaagagacaattggcaaacctagttgttggtattcattgatacctagattgtgcgcaccagcgatgatgccatcaacttgattagcctgaagcatgcgcagatattcgcgttctttttctttgttttgtcctgcattgcataggattactttatagttttgttggaataaagtggtttcgatatcctgtactaattccgcaaaaaaaggattagtgatctcaggaaaaatcaaaccgactaatttcattttctttccttgtaatgagcgggcaatagaattgggacgataatttaattcccgcattgcggcaaaaactttatctttagttttttgacttaaatagccatggttgttgattactcgcgaaacggtagttacagagcaaccggcttttttggcaacgtcgcttaattttgctgccatagtatcacctgatgtttaaagaattgtttgcatttgccaaagcttgccagtgtagtcaatgtcttgagcaaacgcaatttttttgttggtctgatcggcaaagtagcgtccagtcaataccttttcaccatcattaacgaatacttcaattaatgaatgatcaacaaagatatcaagcttgaggtcatgatttggtgaaagcgtaatagctcgactttcgccataatcaactgctactttttgcccagcatgagcacgatctaatactaatttaccatttttggtatcgaaattgagctgtaaactgttacttaagtcattatttgcagctaaatgtaaagtgccactttggttagccttaattgttaattcaagttcaaattgttggccggcttgatcgctgactacttgattagatatgcttgcttcgtttttgcggatactgcttattgccttaactggcgtttgaattaacttgtcactctttaggtggagttccttcacttgactcaagcagttagcccagttttcatcatcagtagggtaagtagtgtcaggcaagccaacccaactgacttcgtaggcattaccatctggggcgttaaaggcctgagtggcataaacatcgaacccgtgatccaaattgtgtaatttacctggattaattaacttatgattttcccagtcaatatcatcagcaataacgtacatatttgggtaaatgtcatcataagctgctacttttttgtctaaaccctgaggacagaaaatgaccacgactttgccatcaacacggacgatgttgggacactcgatcatgtagcccatgtcttcgttggtaaagtctaagaagcccaattcttcccagttctttagatcctgagacttccaaacgtcaatgtgaccgtgtttttcctttttatcttgggcacctaaaattgcgtagtaagtgtcattttctttgataatttggggatcgcgaaaatgttcggtgatgtgatctggattcttaaataggatggttttgtctgaaactttattatttttatccatccaagcaccgatttgataaggagtacgtacccaattttcatcgcggtggttaccggtatacatgatgaaaagcttaccatcgatttcgcgagcagagccagaataagctccatgtgaatcagccattgtgtctggttcaatacctaagcctaagttttcccagtgaaccatgtcagttgatttgaagtgccaccatgactttagaccgtgaactgcgccgaatggatatgattgatagaagaggtggtaagcaccatcaaagtaggaaaatccattagggtcattaattaagccagaaataggatgcaaatgatagcgcatttggtaaggggagtttgcggcttgtgcttgcaaatgcattaatgtatcagcgtcccaatcttgataaggtaagtaacgtttttctcttgtccattccataaatatacctccatgaaagcgttgtctttttacatgtattttaagttagtatgaaaaatatgtcaaacgtttaacagaaaaaataattattaattcataagtaataaaataaataaagaattttatgtcaaacgattgacatattttttgaatgcgttatcataattagtgaattgagaataaaacgtttacataggagggatcaatatggaccacagaaaagtggctgaacgagtaattaaagacgtcggccgtgacaatattattgccggtgcccactgtgctactcgtctgcgtttagtattaaaagatgattcaaaagtcgaccaaaaagcattggataatgatccagatgttaagggtacttttaaaaccaatggtcaatatcaagtaattattgggccaggagatgttaatgacgtttacgatgagttcattaaaatcactggtttgaaagaattatcaaccgatgatttgaagaaggttgctgcagaaggtaaaaagaagaatccagtaatggatttcattaaacttttgtctgacatctttgttccaatcattccagccttagttgctggtggtttgttgatggctttgaacaacttcttgacttcaccaggtctgtttggaccaaagtcagttgttcagatggtaccgaatgttgctggtatttcaagtatgattcaagttatgtcagcagctccgtttatttttatgccaattctagtcggaatgtcggcagctaaacggttcggtgctaaccaattcttgggtgctacaatcggaatgattatgacgacacctggactccttggtgcaaatcacttctgggacatttttggcttgcatgttgcgcaaactaactatcaataccaggttattccagttttagtagctgtttgggtattgtcaattttggaaaagtacttccacaagcacttgccatcagctgttgactttacctttacgccacttctttcaattatgattactggctttttgacttttacaattattgggccagtcttcaaaggcgtatcagatggtattaccaatgctatcgtttggctatatgacactactggtgcctttgggatgggtgtctttggtcttacctattcagctattgttactactgggcttcatcaaagttttccagcggttgaaactcagcttttagcagcctttgctaagaatccagccagctctggtgactttatctttgttaccgcatgtatggctaacgtagctcaaggtgccgcaactttcgctgtttacttcttaactaagaacaagaagatgaagggcttggctagttcatcaggtgtttcagcacttcttggtattactgaaccagcacttttcggtgttaacttgaagtataaattcccattcttctgtgccttaattggttcaggtgtagctgctgcttttgcgggcttgatgcatgttactgcagccgctcttggttcagctggtttcttaggcttcctttcaatttatcctaagactattccaatgtgggttgtttccgtattaattagttttgctgttgccttcatccttacttatgtttatggtaagggtcatttgaaggaagaagttgctgaacaagatgttccagtaaacgacgcaactgattatgctgaagaaactcaaaaggctgaaaagcttggtaaggaacaaatggcattaaaggatgaagttattgcttcaccagttgatggtactcctgagagtttaactaaagttaatgatcaagtattctctgctaagttaatgggtgatggtgcagccgttattccaagtgatggtacgatctattcaccagttactggtactgtgactattgcttatgaaactaagcatgcttatggcattaagtcagacgatggtgcagaagtattgattcacattggtcttgatactgtaaaccttaagggcgagcacttcgaaagtttcgttaagcaaggtcaaagagttaacaagggcgataagcttggtacagttgaccttgatgctgtgaaaaaggcaggctatgatactactgtcatggtagtaattactaacactgccaactatgcaaatgtttcaagaattactgatgcgggtgacaagcacggcgacaagttgattgctgttactgcacacaattagtttcttctactcctctagaaaaaattaaaacaattagaataaaagacgctaagaaagattgtttcttggcgttttttagtactaagtgttgcacttcaattttaagtttgagtaaaatgttctctataaagaaaaacaaagtgagggtatgttttatgaagttaaaaagtggagttattggagtattagtaactggattaactgtctttagcattaatctaactagctctaaaataaaggcagcgataacagtgcctaatcctaagacagattatgtagttaaaactacttctaatgtgtataagagtaatggtaagaggaccagttttaagacacgtggtcagatacaaaccggtaatgttccagtaattgaatcacaactatatgaaggcaagttcattaatgtgcaaggaactaagacgattaatggtactgcttattataagatcggtcctaacgcatacattaaacaaaataatgttttaaattatgctcaagaaaaagcaaagcttgaggcatatcaggcacaagatgatgtgaatgatgattcagatcagtcaacagaattaagctctgatgatgtgaattttgacatagcttggtatgacaacattaatgaggatccatctccagcgatgttcgatgattcaggatatcataatagagtgattaagaatgctcgtaaattattaggctatttcacttatggaacaggtgcataccgaactaattttggcagttggcgtcatcctaataaaaacggttcaactgattgttcaggatttgtgtggatcgtaatgaagagagcaggatatcgtgtaggaaatgctccattttttactctgccaatggaacgagatgctaaaagtactcatggctatttgaagaaaatttctgccaagaatattcgcccaggtgatattgtgattgttaatactggcaatggtgttggtcaaaacggacatgcagcaattgttgatggcaaatatgatggttgggacacgcaaattattgaagagggcggcaacttaggtgtagatgatgtgcaccgctctagtttaggtagctcactgagcgataagctggccaaaggtcgaatcacttatgctcgccccgttaaatagtatgctctatgctataattttgctaatcaataaaggataataagaatgaaaaagaacagcacgcttaaacatgtctggattatgacggctgtctattgggtagtaggtattctaagtattttctggggtaagcttgatcatacttttgcgtctcaattaaaagagatcaataatatttacgtgttagttttaataattatcttaagcttgccgctacttttatcgctgttattgtcggttaaagtaaaaatgccacgtttgatctgcaatccactagttgctgtaatttatctattagtggtaattgcagcaggtgtagcatataacttacaaaatattattggctacttcttcccaatcatcctcttcattattatggcgctagttgctgttttctatgctttggttaagacttttagcagcagaaaaagtggtaaatatttttttattgatggtaaagataagaaagaatgccatgatttctgggatgcttataagaagtactatgtaatgggattaacttacggcattattgatggtttgattactgtaattagttaaaaaagttaagaaaaatcaaaattagcactcaattgaaaaaagtgctaattttttcttgctttttttcacaaaacagtttattatcatatttgtaagttagcacttagcaaataagagtgctaatgattaatacagtaataaaaaatataatgaagaaaattaaacataagggggactaaacgtgttacaaccaattggtgatcgcgtgatcgttaaagttaagaaagaagaagaagaaactgttggtggcatcgttttagcatcaaatgctaagaagaagccaactgaaggcgaagttgtagctgttggtgaaggtgcttacgcatcaaacggtgaaaagattccaatggctgttaagaagggtgacgtagttctttacgataaatactcaggcactgacgttgaatacgaaggtgaaaagtacttagtccttcacgaaaaagacattttagctattgctaagtaatttagttaaaatttccaacgataattaagtaaattaaggagcatagataatctatggcaaaagatattaaattctcagaaaatgcaagacgttctcttttaaagggtgttaataagttagctgatactgttaagactactattggtcctaagggtagaaacgttgttttggaacaaagttacggcaaccctgacatcactaacgatggtgttaccattgcaaagtccatcgagttaaaggatcactacgaaaacatgggtgctaaacttgttgctgaagctgctcaaaagactaatgatattgctggtgacggtactactaccgcaactgttttgactcaagcaattactaatgaaggtatgaagaacgtaactgctggtgctaacccagttggcattcgtcgtggtattgaaaaagctactgaagctgctgttaatgaattgcacaagattagccacaaggttgaatcaagagaccaaattgctaacgtagctgcagtttcatcatcttcaaaggaagttggtaacttaatcgctgacgctatggaaaaggttggtcacgatggcgttatcactattgaagattcacgtggtatcaacactgaactttcagtagttgaaggtatgcaatttgatcgtggttacttatcacaatacatggtaactgacaacgataagatggaagcagatcttgataatccttacattttgatcactgacaagaagatctcaaacattcaagatatcttgccacttcttcaagaaattgttcaacaaggtaagtcattattgatcattgctgatgacgttactggtgaagctcttccaacacttgtattgaacaagattcgtggtaccttcaacgttgtagctgttaaggctcctggctttggtgaccgtcgtaaggctcagttacaagatattgctgctttgactggtggtactgtgattactgatgacttaggtcttgaattaagggacactaagattgatcaattaggtcaagctcgtcgtgtaactgtaaccaaggactcaactactattgttgacggtgctggttcaaaggatgctattcaagaacgtgaagattcaatcagaaagcaaattgaagaatcaacttcagactttgacaagaagaagcttcaagaacgtcttgctaagttaactggtggtgtagctgttatccacgtaggtgctgctactgaaaccgaattgaaggaacgtcgttacagaattgaagacgctttgaactcaactcgtgccgctgttgatgaaggttacgttgctggtggtggtactgctttagtagacgttgagaaggctatcaatgatcttaaggctgatactgcagatgaaaatactggtatccaaatcgtattaagagctttgtcagcaccagttcgtcaaattgctgaaaacgcaggtaagaatggtgaagttgttttgaaccacttactcaagcaagaaaacgaaattggctacaatgctgctactgatacttgggaaaacatggtagatgctggtatcattgacccaaccaaggtaaccagaaccgctttgcaaaatgctgcttcaattgccgctcttctgcttactactgaagctgttgttgcagaaattcctgaagaaaagccagctaacccagctccacaagctggtgcaccaggaatgggtatgtaattatatatcttaatgctttagcatttagatatataattcttgattacgaagtaatcaagttcatttacagtgctttagcactaaacttatgcacaaactctcactctagttcaaaaacaaatataattaaaatgacttcgaagttaaacaatcagttcagcttcgaagtttttctttttgtagcgtataatattgtacgtaactctatctaaaatacgaaataggaaagagacataaatgacggaaaaaacaactccaatgatggagcaatattacgaaattaaaaaacaatatcctgatgcctttcttttttatcgcgtcggagacttttacgaactgtttgaagatgacgcagttaaaggtgcacagattcttgaattgactttaacgcaccgatcaaatagaactaagaatccaattccaatggcaggtgtgcctcatatggctgtggatacttatgtaaatactttagttgaaaagggttataaagtagcactttgtgaacaacttgaggatcctaaaaaggccaaaggcatggttaaacggggaattattcaattagtgacgccgggaaccatgatgaatgaaggcccaaatgatgctaaagattcaaattacttaacatcagtaattaccactaagagtggctttggtttagcctacagtgatttatccactggtgaaatttatgctactcatttaaagagtttcgatgctgtttccaatgagctcttgtcacttcgtactcgtgaagttgtgtataacgggtcattatctgaacaaaataaagactttatgcacaaggccaacattacgatttctcgacctactccaattgaaggtgaacatgctgaaatttcttatgttgaacagaatttgactaatggggctgaaaaagaggctacccgtcagttagttggctatttgctttcaactcaaaagagaagtttagcgcacttgcagattgccaaaagctatgaagtaaatcaatatttgcagatgtcacatactgtgcagaataatttggaattggttgcttctgccaaaactggcaaaaaaatgggttcacttttctgggttttggataacacacacactgccatgggtggacgcttgcttaagcagtggctagctcgtccattattaaacatggatgaaattaaccatcgtgaagaaatggtgcaggccttgcttgatggctactttacacgagaaaatgcagttgatgccttaaagggtgtttacgacttggaacgtttaactggtcgaattgcttttggtaacgttaatgcgcgcgaattactacaattatcacgttctttgcaggccgttccagttattttagatgctttagagcaatcagattcagatatcttggtcgattttgctaaaaaaattgatccattaaagggcgttgccgaaatgattacttccactatcgtgaaggatccacctgtgttgactactgaaggtggcctgattcaaggtggggttgatccgcagcttgatcgctatcgggatgccatgaacaatggaaaaaaatggttggctgaaatggaagcagatgagcggcaaaagacaggtattgataacttaaaggtcggttataacaaggtctttggctattatattcaggtttctaacggtaacaagtctaaggtgccacttgatcgttatacgcgtaaacaaactttgactaacgctgagcgttatatcacaccggaactcaaggaacatgagaatctaattcttgaggcacagacacggtcaactgacttggaatatgatttatttgttaagctgcgtgaggacgttaagaagtatatccctgctttacaaaaattaggtgggcaactagcagcgctggatgtttattgtggttttgctacagtagctgaacaaaataattattgccggccaacttttcacgcagataatcaagatattaatgtgactaacggccgtcatccagttgtggaaaaagtaatgacggctggttcatatattcctaacgatgtcaaaatggatgaaggaaccaacatttatttaattacaggtcctaacatgtctggtaagagtacctatatgagacaaatggctttgattgcgatcatggctcaagtaggttcctttgtgccagctgatagtgctgatttgccaatttttgatcaaatttttacaagaatcggagcagctgatgacttaatttcaggtcaaagtacctttatggtagagatgagtgaagctaatgaagccttgcagtatgctactaagcgcagtttggttctctttgacgaaattggtcgtggtacggctacttacgatggaatggctttagctggtgcaattgttaagtacttacacgacaaagttggtgctaaggcattatttgctacgcactatcatgaattgacagtgatggatgagactctggatcatctgaaaaatattcacgttggtgctaccgaagaaaatggcaagttaatcttcttgcataaaatcctacctggacctgctgatcaaagttacggaattcatgtagctcaattagcaggtttgccgcgcaacgttttgcgagaggcaactaaattattaaagcggcttgaagcacaaggcagtgaactagcaccagtttcgcagcaattagatttatttgcagagcctgtggaaaacagtgttgaagaaactgaaacacaaaatgacaagcccgcaataactgatgcacaacaagatatacttgatgatatttctaatctttatttagcagataagacaccgttgcaggttatgcaaatggtagctgattggcaaaaagatttaaaggatgacgattaatgagcaaaattcatgagttatcggaaactttaactaatcagattgcagccggagaagtaattgagcgcccagctagcgtagttaaagaattagtagaaaactcgttagatgctggtgctactcgaattcgcgttgattttgtagatgctggtttgaaacagattgtagttcaagacaatgggacggggattgcacgtgatcaagttgatctagcctttacccgacatgcgacaagcaagattgccaatgaacacgatttatttaaagtttccactttaggcttccgcggagaagcattagcttcgatttctgctgttagccatgtggaaattctgactgcaactgaaaacgcaattggtattcgagctaactatagtggaggcaataaaaaaggccaagaagatgcagcggctcgtaagggaacaaaaattacagtcaaggatttgttctttaacacgccagccagattaaagtatttgcgtagttcaagaactgaaattatgaagattgtggatattattaatcgacttgtgttaggttatccacatgtgtcttttactttgtcaaatactggcaaaattttattaagaacgccaggaaataataatttaaagcaaacagttgctaacgtgtatggccgtcatatcgcagaaaaaatggaaaaatttgaggcaaaagacagcgattttaagattacaggtctgatgtctaaaccggaattaacacgttctacacgcaattttatttcgattctcttaaacggccgctatattaaaaattttcaattaaatactgcgattctggatggctatggctcaaaattagcagcgcggcattatccgattattgtgttagcaattaaagtagatcctttgttagtggatgttaacgtgcatcccactaaacaggaagttcgtttatccaaggaaaaagaactgggtcgtttaatcaccagtgcaattagtaatacacttgtggaaaaagttggacaaattagcgcttttgctaatttggaaaataaacgtgatacgctagttgatcagcttagttttaacttaaatcaagatgttgtaaatacagctcgtaaaaaagaaccggaaattcgcgaacaagaaaagccaaaatttttaacgattgaatctgatgattcagaagataatattcaaaatgaggcggtaaagcaggatagtgaaaagaaatatgttgatcttaatcagccacgtgaagatgatcaatatatcgttactaagacctggaaacaaaatgttgctctgcagcaagcactaacgccatttcctacaactaggactaatcaggaagtcatttcaagtggggatgaaactttagctaataatctgcctcgcttggtttatgttggacagaccgatacttatttatttgcccaacataatggcgacctatttttaattgatcaggttgctgctagacgaaggttaaaatttgagcaaatttttcacatgataactgccaaaaaagtagtacaacaaggtttgttaacaccaattattttagaatttggtaatcttgattttatgcaaattaaggatcaagtagaacagattaagcaggttggaatctatttggaagattttggacaaaatagttttattgttcgttcgtatccaacttggattcacgataatgtcgaagattcaattcggaagattttagatggttatttgaatgtggataaaggaaaggcaaagaacctgtttagccggatagcagcaatgcaagctaagcgagaaattactggcaagattaaattatctgcagctgaagctgagcaaattttacttgatttacgcaagtgtactgatccatatcatgatgcagatggacggataattttggttagaatgagccaaaatgaattgagaaaaatgtttaagaaggatgaataatgtacgaatattttgaaggtgtgattactgtggttacaccaagctatgttgtagttgatgtcgggggcgttggctacaaggtctatagtcctacaccttttgcctatactcaaggccaaaaagctaaggtctttattgagcaagtggtgcgtgatactggcattactttatatggttttcaaagtcaagatgataagggcttgttcttaaaactacttagtgttagcgggattggtcctaagagtgcaatggcaatcatggcagctgaggatagtaattctttggcggaagcgattgaacaaggtgaagttaagtacctaactcgttttccaggtgtgggtaaaaagacggcttcacaaattgtgcttgatttgaagggtaaattaggtgattatgttgctcggcttgatcgtccagacaatggtgagaatgtgccgccagcattaaatgatgcactgcttgctttaattgctttgggttatacccaaaaagaagtggatcggatcacgcctaaactggagaaagttgctgcaaatactgcagatcaatatattaaaaagggcttagcattactgcttaaaaagtagatcttggtataatagaacagatgattattttttaaggaagtgaaactggtggcagaagatcaagtaacttcaggtgatattgagaatcctgaagaacaacaaatggaactttctttgcggccgcaaacgctcgaccagtacttaggtcaaaagcgggtcaaaaaagaaatgagcatttatattaaggcggcgcgccaacgtgatgaagcattagatcacgttttgctttatggaccaccggggttaggaaagacaactttggctttcgtaattgccaatgaattgggagttcatttaaagagtacaagtggtccggccattgaaaaggcaggcgacttggtggcacttttgtccgacttagatcctggggatgttttgttcattgatgaaattcaccgtttagctaagccagtagaagaagtactctactctgcaatggaagactactatatcgatattgtgattggcgaggggcagactactcatgcagttcacgtgccgctgccaccatttactctaattggggcaacgactttggctgggcaattgtcagcacctttgcgtgatcgctttggcatcgtagagcacatgcagtattacactatcgatgagctagaacaaattgttttgcgttcaagtgatgtttttcacacttcaattgcgcctgaggcggcccatgaattggcacgacgctcgcgtggtacacctcgtgttgccaatcgcttacttaagcgggtgcgtgattttgcggaagttaagggagaaaaaacaatttcgctcgagactactgaaggcgcgttaaaacaattgcaggttgacgatgagggacttgatcagacagaccgcagattattgagaacgatgatcgaaggatataatggtggtcctgttggtattcggactttggcagctaatgttggtgaagatatggaaacgattgagtcactatatgagccatatttgttgcagcatggttttattttactcacgccgcgtggcagaatggtgacggataaagcatatttacagttaggattaccaattccaggtgataaatagtcccattttctgtataatggttataatatctagaaaataattttaatgaggtggaaattttgaacattttatttttagcaaatgccggtgctgcagcaagtagcaactggatgatgatcggtttatttattattttgatcgctttcacttactttggtatgattcgtcctcaaaagaagcaacaacaacaaagaatgcaaatgatggacaaattgaagaagggtgacgaagtcatcttagttgatggtttgcatggtaaggttgacaagatcaacagtgataagactatcgtggttgatgcagatggcatttacttaacttttgaaagaatggctgtccgtcgtgtgattccagttgctgcaccagcaactcctgcagctgaaactaaggctgaagctccagcagaaaagccgaaagaaaaagcagacgaaactaaaaaagaggataagtaatcatattacttaagagcgtcattttaggcgctttttgttttgctaaaaaaatccttgttgtaaaatagaagtgataattttagttcaaagaaagggatctgaaatgaagaatattcccgttgtaatgattctttttggtggtagtggtgatttggctcaccgcaagctttatccagctttgtttaatttgtatgaacaaggcttaattcacgacaactttgcagtaattggaactgctcgtcgtccttggtcacatgagtatttgcgtgagcaggttagtgatgctattcatgaaacgcacgatactgttgatgaaaatgagttgaaagcttttgcaagtcatttttattatcaatcacatgatgtaactaatgtggaacactatgagattttgaaaaacttggcacaagagctcgatgatcgttatagtgcacaaggcaatcgtctcttctacatggctatggcaccaagattctttggcacaatagcaacgcatattaatgaccaagacttgactggtagtggctttaatcgaattgtagttgaaaagccatttggtcatgatttggcttcagcagaggaattaaataagcaaatcacggcttcatttgatgaaaatgatatttttagaattgaccactatttaggtaaagaaatggttcaaaatatcatgccaatgcgttttactaacccaatggttcaaaatatttggtgcagcaagtatattaagaatatccaagttaccttggcggaacgtcttggcgtggaagcacgtggaggttactatgatacttcaggtgctttgcgtgatatggtacaaaaccatatttttcaaattattactctgctagcaatgccagaacctaaggatctttcttctgctagtgttcaccaagccaagcaagatttgcttaagagtttaattattcctacgccagatgatgtcaagaaatactttgttcgtggtcaatatttgggtagtgatactacttttgcttataagcaagagccaaatgttgatccagagtcaactactgaaaccttcgttgcaggtaaagttaagtttaatgagggaccaattgctggcgtaccaatttactttagaacgggtaaggaatttaaagaaaagaagaaccggattgacattgttttaaagcatattaataatccatatgggcaagctcattctaacaatattacgatcgtgattgacccaactagtgaaatttactttactattaatggcaaacgaattgaccaaccaggaattcgccgtgaaaacttaacttatgaattttcaaaagccgaaatggctaaggtacctgatggttatgaaagattgcttcatgatgtttttgtcaatgattcaactaactttacgcactggagcgaattgaagcgttattgggaatttatcgatgcagttgaagatgcttggcagaaggaaaatgaagcaggcaatccagccattgcacaatatttgccatacagaatggggccaaaggaagctaatacaatctttgagtcaccaactgaacattggatttatgaataaagaaaatttattaccgcaaaatgacatccatcgtcggattattcatctggacatggatgctttttatgcttcggttgaaatgcgggagcatcccgaatggaaaaataaggcattgattgttgggcaagatccacgacaaaatggtggacatggagtagtggctacttgcaattatgtagctcgtaagtatggcgttcattcagctatggccgcaattcaagcagtacgtttggttcccaaggagctaatagtttttactagaccacgatttgataaatatcgtgcagtgtcagctaaaatccattcttttatgcatgatgtgacagatcaggttgaatcagtggctttagatgaagcttatctagacgtgacacatccaaagatagagcaggagtctgcagttcaaattgctttagatttacagaaaaggattcggcaagaagtaggcttaaactcgtcttttggcgtttcctataataagtttttagctaaaatgggatcagaatacgccaaaccgtttggtcgaaccgtaattttgcctagtgaagtgcagaactttttagcaatgcaaaagattgagaagtttcctggtattggaccgaagacgcaagaagagctgcatcagatgggtgtttatactggggcagatttacaaaaaattgaggttttaaccttaattaaaaaatttaagaaaatggggtatattttagcccaacatgcacgtggaatagatttaagacctgttgttacagactcagaggctaatcgaaaatcaattggcatggagcggacttacgagcctgcaatttatactgaggatgaagccctaaccaatattcgtaactattgcaatcatttggaagcagcattaaaaaaacgcaattttaaggcaggtactgttgttattaaagtaagaaataataattttgatacggtaaccaagagaaaaaagttgaaaacaccttctgatagtcacttagatttttatgatgtggctcgtgacttgttcgaagcaacaagttcctttttagatgatggaattcgtttattgggagtcactgtaactgactttgaaaagaaaaaatatcaatcaatcagtttgttcgactaataaataaagctatttttctggtaaactagatacagatatttttacaagatgaggagattaaaaatgagtagttttgatgacatttatgaaaaaatcttacaatatcctacaattatcttgcaccgccacactagtcctgatccagacgcaattggttcacaagctggtttagctagagcattaatggaaaaattcccggacaagcgcatactttgtgctggggaaaacgatgaaggcgacttagcttggattaaccacatggatcaagtcaaggcaactgattacgaaggtgctttggtaattactactgataccgctaatacaccaagaatttctaataagttgtatgataagggtgactttttaattaagattgaccaccacccagatgttgatccatatgctgatatgagttacgtagatccagatgctccagcagcatgccaaatcattgtagacttcttgaatgaagagggctttaagattaccaaggaagttgcttacccactttatgctggaattgtaggcgataccggtcgtttcatgtatccagaaacttcagagcatacttttaaggtggctgctcaattagcttctactggaattaacattactgaaatcgctcgtaatattgctgatgtaacttttgatgaggcaaaattgcaagccttggcaatggacaagatggaaattgatcccgttggtgcagcttttacaattttgatgcagtcagacttgaagaagttaggtttgactgatgatcaagcaaatgttgctgtatctactccaggacgtattaaagatgtgcttgcttggaatgtttttgttgaaaaaccagatggtactttccgcgtacattaccgttcaaagggccctgtaatcaatgaattagctgctaagcatgatggtggtggtcatgcattagctagtggtgctaacgctaaggatatggacgaagtaaagcaggtatttgcggaagtcgttgaagtaactaagaagtttaaagaagatcatgaataatatttttatagattcaagaattaaaccagctattcaggctggtttaaagaagatccattttgaaaagccaactaaggtgcaggagaaagttattcctgctatgttgtctgacttgagtgtagtagtgcaagcagcaaccggttcaggaaaaacgcatgcttatttagtaccaatttttaatgaaattgaagaagataaacgctatgttcaagcaatcgttactttgcctagtcgtgaattagccgatcagctttatcaagtagcacggcagctccgtgatgcggcagggatgcatttttcaattgcacatcttgcgggcagaactgatcgtgaacgtcaattagaaaagtatcaaaataatactccacaattggtgattgcaactccaggacgtttgttagactttgttcaaaagaaggtttttgcagttgatcaagtaaaaacttttgttatcgacgaagctgacatgaccttggacatgggctttttgaacgacattgatcaagttgctgctaaattgccgaaggatgtccaaattgctgccttttcagcaactattccagttaaattgtctaactttttacgcaaatatatggctcatcctgatgatatcgttattgataatcctagtgttattgcgccaacgattaaaaacgatttgcttgatattggctcaaaggatcgcaagaatgtcttgtacaaattgttaactatgggacaaccatatttggcgttggtttttgctaacactaagcaaaaggttgatgagttgactaattatttgcaagatcagggtttgaaggtagctaaaattcacggtggggtaactgaacgtgaaagaaagcgtactctgcgtcaggttgagcaaggacagtatcaatatgtggtagctagtgacctagctgctcgtggcttagatattgatggtgttagtctggttgtcaattatgaaataccacgtgatattgagtttgtaattcaccggattggtagaactggccgtaatggtttgtcaggtcacgccattactttgattcgtgaagaagaaatgaaccggattgaagacctagaaaaaatgggtgttcattttgactttgttgagattaagaatggtgaattagtgccacgtaaacactatcgcagtcgtgaaaatcgtcaaagcaagaatcgtaagcttgataccaagctggtgggttacgttaaaaaagagaagagaaagcgtaagccaggttacaagaagaagattaagcgtgcgattcaagaggataatcgtcaaaaacgtaagttggaacagcgtcatgaggttcgtaaggcaaaacgtttgagaaagcgcaagcgtgaacaagggctttgacagaagcggattttgtagtacaattatttcagcttaagatatgttttttgatcaattatttcaaagagagagccagttagatgagaatggcttaataatagtcaaaaaatgctcctttaagtttcataattaagaatatcaagaggtaacaaacactgttgcaatcaaggtggtaccgcgcgtggagcgtccttgaagaaagcaatagtgttttttatttatttttagggagatttattttaatgaagaaactaaatagttcagagtttcgccaaatgtttttagacttcttcaaggatcatggtcacatgattatgccaagtgcatcattaatcccacaagatgacccaactcttctttggattaactcaggtgttgctaccatgaagaagtactttgatggctcagttgtaccaaaaaatcacagaattacttcatctcaaaagtcaatcagaaccaacgatattgaaaatgttggtaagactgcacgtcaccaaactttctttgaaatgcttggtaacttctcagttggtgactactttagagatgaagctattccttgggcatgggaattcttaactagtcctgattggcttggcttgccaaaggaaaagctttactgtactgtttatccaaaagatgaagactcatttaatgtttgggtaaaggcagggatgccagctgatcatattgttaagttggaagataacttctgggatattggtgaaggtccatgtggtcctgatactgaaatcttctacgaccgtggtcaagaaaacaacgacgttgctgaagacgatccagaaaacttccctggtggtgaaaatgcacgttaccttgaaatttggaacatcgtattttcacaatacaaccacttgccaaatggcaaatatgtagaccaaccacacaagaatatcgatactgggatgggactagaacgtgtgctttctattttgcaagatgcaccaaccaactttgaaaccgacttgttcttgccaattattcacgccactgaagaaatgactgatgacaagaagtacggcgttaacaaggaagacactactgctttcaagattatcgctgaccacgttcgtgccgtaagttttgcgattgctgatggtgcgcttccttcaaactcgggccgtggttatgttcttcgtcgtttgatccgtcgcgcagacttgaatggtcaacgcttaggaattaagggtgccttcctttacaagttggttccagttgttggaaaaatcatggaaagtcactacccagaagttatggatcaacgcggctttatcgaaaacgttatccaaaacgaagaagaaagatttcaatcaactcttgatactggtttgactttgcttgacgacttaatcgacaaggcaaagaattctaaggataagaccatttcaggtaaagatgccttcaagatgttcgatacttacggcttcccatatgaattgacttttgaatcagcacaagatgctggccttaaggttgacaagaagggctttgatgcagaaatggctgctcaaaaagagcgtgcacgtaaagctcgtggtgaccttcaatcaatgggacgtcaagatgtaactttaatgaacattaaggataagtcagtctttgaacgtgatacttacgaagaaccacatgcaaagctagttgacattgttgttgatgataagttggttgataaggccgatggcgaacatgctactttggtctttgacaagactccattttacgcagaacgtggtggtcaagttgccgaccacggtgacatttacaaccaagacggtgaattggttgccaaggttactgacgtacaacacgctcctaatgaccaaaacttgcactttgttgatttgattttgccagttgaaaagggtcaagaatacgtattgaagttagataaggaacgtcgtgaagggttacgtcactctcactcagcaactcaccttcttcacgctgctcttcgtcaagtcttaggtgaacacactcaccaagctggttcattagttgatcctgactacttaagatttgactttactgcaatggaaccaatgaccaagcgtgagcttaagaccgttgaagaattggttaaccaaaagatttgggaagctattcaagttaagactactatcactacccctgaagagggtgaaaagatgggtgctttagccctctttgatagcaagtacggtgataaggttcgtgttgttcaaatgggtgacttctcaagtgaattctgtggtggtactcacgtggacaatactaaccaaattggaatcttcaagattacttcagaatcagctgtcggtgctggtatgcgtagaattgaagctgtaacttctaagaaggcttatgaatacttggcaaaccgttcagacttacttgatgatattcaagaagaagttaaggcaaccaagccagataacattgtcgataagattgattcacttgaaagtgatttgcacgatgctcaaaagcaagttgaaactttgaacaagaagatcaatgctgctaaggctggtcaaatctttaatgacgttaaacaagctggtgacttgactgtcattgctgctactgcagatgttaacgggatgaatgacttgcgtgaacttgctgataactggaagagcggcaacaagtctgatgttttagttttagctgctgaaaatgctggcaaggctaatatgattattgctttagaccaaaaggcattagacaagggccttaaagcaggtaacttaatcaagatcgctgccccaatctttggaggtggcggtggcggccgtccaaacatggctcaagccggtggtaagaatccagcaggcttgaatgatgctattaaggcagttattgacgaaatttctaagaactaagaattaattaattgtgtttaagctttttttcaagtaaaattgttgacaggaggaataaatatgagttcgctagataagactatgcattttgactttaatcagaacaaaggaaaaaatgtttatgatactctgcaagatgtttacaatgcgcttgaagaaaagggctataatcctattaaccagattgtaggttacttactttctggcgatcctgcttatattccacggcataacgatgcccgtaatttgattcttaagcacgaacgtgacgagattattgaagaacttgttaagagttatcttggtaagaataaataatgcgtttattaggtttagatgtaggttctaaaactgtgggagtagcaattagcgatgagctaggaattactgcccagaagttggagactatccagattgatgaaagcagatataactttggtatgcgtccattgaagaagctagtcagacagtatgaagttgacggtttcgtattaggtttacctaagaatatggatggtacttctggtagttccgtagctagaagtaaggcatacggcaaacgactagaggaaaagtttggtttacctgtacattattctgatgagagattgacaacaattgaatcacgacgagtacttgttgaggatgcagggatccatgatcgcaagaagcgtaaacaagtaattgatcagatggcagcggtgctcatcttgcaaaattatttagatttacaccgaaaggattaaaatggcagcacaagttaatggtgacgatcaagatcgtcaaattactttgattgatgatcaaggtaatgaagaattgtatgagatattatttacttttcattcagatgattatgacaaatcttacgtgcttctttatccagccgctgttggcgatgatgaagatattgaggtgcaagctttcagttatgatgccgatgatgccggcgatgtaacaagtagtgatttgcatgagattgaatctgatgatgagtgggacatggtccagggagttttaaatactttcttagatgatgaccgcttgagtggtaaataataaaaagaggactggctgtggctggtcctttttgttagttttagaaaaaagataaaaatgaacaagaaaatattagagattttagaatttggcgaaattactaagcgcttgagtaaattagcgattactggtcccgctaaaaaagaagcggaggaattattacctagtggtgattttgaacaagtacaaaatgagttaaagcagactttagctttgactaatttgctacgaattaagggacaacttcctttaacggactttcaggacgtacgtccaagtactaaacgtttaagcgtgaaagctaatttaaatgctaaggaattaggtaatttattattagtattaagtttagctcatgaaattaatgactttttggcagaaatagatccaaacaaactggatttaactgcaattgatgaaattttagatcaattagatgtgccggatcttttatttagagaattaaagaaatcagttgattatgatggtgaggtattagatacagcctcacatgaactagctcgtttgcgtcatgatatacgttctaatgaagaggaaattaagaataagatggatgcttatactaagggcaatagtagtaagtatttatctgagcaaattgtgactattcgtgatgatcgctatgttattccagttaagcaagaatatcgggcaaaatttggtggggtagttcatgatcaaagtgccagtggtcaaacactgtttatagagccggaagccgttttaaatcttaataaccgccaacagaatttaattgctcaagaaaaacaagaaattcgtaatattttgaagcacttatctaatttggctcgtgaagaaattactagtttgaataatattgcggctgcattaactgaactagatttcttgcaggctaaagccaagttagcaaaagaaatgaaggcaagtgagcctcgtctgacacaagaccattctttgaacttattaaaagcgcgtcacccattgattgacccagaaaaggtagtacctaatgacattcgtttaggtggtgaatttgatactatgctgatcacggggcctaacaccggtggtaagacaattaccttaaaaacagcaggattgcttcaattgatggcacagtctggattatttatcccggctgaagaaggtagcaaggttggcgtctttaagcaagtttatgctgatattggcgatgaacagtcaattgaacaatcgttaagtactttttcatcacatatcaatgacattattgcgatcatgaagaatgttgattctgagaccttagttttaattgatgaaattggtgcagggactgatccagaagagggtgctagtttggcaattagtatcttagactttttgcgtaaaaaagatgctaagatcatggtgacaacgcactatcctgaattgaagctttatggttataatcggccacggacgactaatgcctcaatggaatttgacttaaagaccttgtcgccaacttatcatttgcagattggtattcctggtcatagtaatgcctttgccattgcccgcaagctagggatgcgtgaagatgttgtcaaaaatgcccagaacttaatgtcagatgaagattctgatattaataagatgatcaccaagttgaatacgcaaaccaaggcagctactgtggctcgcaatcgtctgcaaaccagtttggatcggagccaaaaattggagcaaaagttgcaacaagcacttgattggtataaccaacgtgtacaaaaacagcttgattttgcacaagagcgagctaatgaagttgttgccaaacgccgtaaaaaagctgatgagattattgctcaacttgaaaaacaaaagaacatgggcgtcaaggaaaataagattattgaagctaaaggcgaactcaacagtttagagcgtcaggctaataatttggctcataataaggtcttacagcgtgaaaaacgtcgtcaccatgtaagtgtaggcgatcgagtaaaggtcctctcatatggtcagacaggtacgattactaagaagttatctgaacatgaatatgaggttcagatgggaattatcaaagttaaggttagtgatcgcgatattgagaggattgaaaagggcgaaagtactaagcctagacaaactgttagagcaaccagtgcggttagaagaagtaatgctcatagcgagctggatttgcgaggccaacgctatgatgaagcaatgactaatttggaccgatatattgattctgttttactggcaggacttgatacggttacgattattcacggtattggtactggtgcgattagaaaaggtgtttggcaatatctccgcagcagcaatcatgtaaagaactttaattatgcaccagctaatgaaggtggcaatggtgcaacaattgtacaattaaagtaagcgtcttacttgcaaaaagtaagtataatagaatatacttataatataaataaatgaattgaaaaaatgtgaggtaataattatggttgaagcaattaatgatcaaaattttgaagaagaaactaagaatggtgtagcattagtagacttttgggcaacttggtgtggtccatgtaagatgcaatcaccagtaattgatcaattatctgaagaacgtcaagacgttaacttctacaagatggatgttgaccaaaatcaagatacagctaagaatttgggtattatggctattcctactttaatcgtaaagaaggatggcaatattgtagaccgaattactggttacactccaaaggaaaagttaaaccaaattttggatcaatatactgattaatttaaaaatcaaaaaaagcttgagacgatgttgcctcaagcttttttgatatatcacttattttgatttacttgcttttttagcaagtcacgaatttcttctaaatagtcggcctcagttggaccagcttctttttctttcttgggcattactctatttaaagccttgatcattaaaaataccacaaatgaaatgatcaagaagttaatgacagaattgatgaagctgccatatttaaatgtagcatccccaaccttaaaaacgaggttagaaaaatcaattttgccggcaaagatcccaagtagggggttgatcaagttttttactaaagattgtacgatagcagtgaaggcagcaccgatgattacaccaactgccatgtccattacattgccacgtgaaataaactctttaaattctttaatcatgctctactcctatatctaatatatctaaaaaaatgcgattttaactaaagtatatagtagtggttatttatagtctatcaatttgcttttaaccgaagcgagcgataaattgaactttcttttctttatctaaaatattaatttcacattcggtggttcgaccagttgatttttgaaatgcttccgcgatcattccgccttcaagggagaattccttgctggcgctattcaaacgatcagtgacagtttggccacttaattcgtaagtagtaaatgatcgtctttctttaactttttctagcttaccaaattcagccatgttgaagaattcaactaaatcatcataatcacttaaatcatattttcgcgcgattctcttgccagcccaataaagaattgaggcgtcatcatcgcctaaaatagttggcaaaaggaaatcgcggtaaagttggttaataaaatatacgtgctcgtttgtgttttctgtgttttctgtcataaacttgttcatcccttttattcttttttattttaccgtaaactagtataagtagaaaataaatttttgattttaagagggttttattatggataatcgtccgattggattattggattcagggctaggtggcctatctgttgcaaaaaaagtaattgaaaaattgcctaatgaatcaactgtttttattggtgataacgctcatatgccgtatggcgatcgaactaaagaagagattattgaactagttagaaaatcagtccattttttgttagataaaaatgttaagctgataatttttgcctgcaatactgcgacagcaatggctatgagtacgattcaagcagaaatcgatccacaaattatcggagttattcagtcggggagtttggccgcttcacggacaactaagaataaaaaagttgcggtagtttcaactaaagcaacagcagaatcacatgcttatgctaaagagatccgtttccgtgatccagaaattcaggtaacggaattagctgctcctaaacttgcaccacttgtggaggctcaaaaagatcatgaaaccaacttaaaagtagttaaagagagtttgacccccttacaaggaaaagactttgacactttaattatgggctgtacgcattatccattgattcagaaagaatttaaagaagcaattaatgataaaaatgttactatcttggatcctgcagatcaagttgcacagtatacgtttaatgtgatgcggcgcgatggtttgtttagtgatggtaatgaaaaagtcagtcatgaatattacactacaggcgatccaactagttttgatcatttagcaaggacattcatggatgatgcaactttaacatctaagcatgtggatacggagaatgaataatggttaaagaaattttatttgcgactggtaatcaaggtaaagcaaaagaactaaaagaagcctttaaacaagctggggtagatatcgagattaagacgaatgctgacttagacaatccgcctcatccgattgaaagtggccatacgtttgaagctaatgccaagattaaggcccatgaattagctgagtttagcaagttgcctacgattgccgatgattcaggtttaatggttgatgccttaaatggggagcctggtgttagaagtgcacggtatgcaggcgaagctcacaatgacgcaaagaacaacgccaagttattagctgaattaggcggtgtaccggatgaaaaaagaacggctaaattttggactacgattgtagtttcgatgccaggtgaatttgataaagacttggttgtgtcaggtacttgcagtggtcgtattttggccgcaccacgtggtgaagatggttttgggtatgatccattgttttatattccagaaaaagaaaaaacttttgcacagatgactactgatgaaaagaatgagatttctcatcgtggtaatgcagtgcgaaaattgctccaagaattgccagcttggttagaacaatttgattaaggtaaaaatagctcagttcgggtcattcgtatgatttgaactgagttatttttagtgaaatgaggtggatatatatgtcaaaaagtattggggaagcgctgaaagaggaaagacggtctttaggattaacacaggaacaatttattaaagggattattagtgaatcgttttattcaaaagtaggacgaggtaagaatgaaatagtagcagtagatttactaaagattttagctgctaataacattagtgaagaagaatttttaaataaactaaatgttaaggaaaataataatttagaggaagacttaaaagttcaattacttaatgcatattctattcatgataaaaagaaaatcagtatgttagtcccaaaaatacaaaatgcagctatggatgaaaatactaaaatatcagctcgtttgattgatgcagttgtaaataataagattaatgatttaactcaaagagaaattacacaaattaagagaaaattttttgaagttgatgattggaccaaaaatattacaaccttacaacttttttgtaattcaatgcttttgtttgattttgatgagctggttctttttgtaaaaaaactggaaaaaacatgtaaagggaagttgatgaaattaccatttaatactcaaaagataattgcatcgatttgcataaattattttcataattgttatacaaatgattgtagtcgaaactgtcaaatcttttgtgtaaatagttctttctcgtaaattgattttttaattatttatttaatcaaagtaggattctaaggtgtcctgaacctgaccaaagcctttatgaattcgattgaaataacggtcattgtagctcattgcctgaataccaataaaagcatcaagcgactgttcagttggaaactctgccttaggcttagctttgcgcttgatcacattgttaaatgattcaatcatgttagtcgaataaattgaagctctgatctgcttgggatagttataaaagaccagcagatctggttctatgtctttcaagcttctgataacatggctgtaaaccttgccccatttggtatagaagtcatgcaggacagctgtggcttcttctttgtttgtctgttgatgcacctgtttgaattcgttcatgatcttttcacgatcgtcgacgcgtactttagcgcagatattgcgcatgacatgaaccaaacagcgttgaaaatgagctttaggataagtcctggccaaggctgttttcatgccaacaacaccatcagaaagaaagagttcaacttgcttcaagcctctggacttcatgttttgaagcatctctgtccagacttcaatgttctcactaggagcaatgcagtagtcaatgacttccttatgtccattaggtttaatgccaatggcaatatagactgcttcacgctcaacgctcaaacgtttctcggcgcaaaggaaggtatgtcgcatccaaatagacgcagaaaaacttgtcgcttagcttgcgtttgtggtaagcctcaacctttggaatcatctgcttggaaatatttgatacctgagctggactgtaatggctgccatacatcttttcaattagatcggctatttccctggtggtcacgcccttggagtaaagcttgataatcatgctttccaagatatccgagtgctgcttgtagtcaggcagcgtgtgctgatgaaattgaccgttgcgatcccgaggcacttgcacttcaattgggccaaattgcgtatcaactttgcggaaataagcaccatttctagagttgccagtattccagccatttctggcatagggatcatagcccagaaaggcagtcaattcagcttctagcaagttattaacagcctgttgtagttctttgcgcaataaatcatttattttgtctggattgaatagagcttgagcaaaatctttggtaaaatcattcatgaaggagttcttctttctgtatgtgtttttttgttcaaaccaatcatacgagaaaggaactcctttttctaatgtttaaagaaataaatttaaggaatcattcatccttacacaaactattttacagtctcaagatgcaagctatggttatgaaataatagaagaattagctaatattccggattttggaatatatgtgatagttactaatttttataaggcatattttcaaggcaataaaaagcaaagtcaacagatattagatttcttgaatcagaatggactaaacgaaatatctagcagattgccatagtcatatatgaagacttaattcaaatatgaagagtattagatttttttaatgtttatactataattttaataattaatgtaactcttaggattagcctaagggttattttagtaacaaaattatttatgtggagaaagaaaaatgagatcgcaatatttccaagccacttttcgaattgcacgtaagtcgaaaaagaatatgttgcttgctgttttattggtactttgcatgatttttgctgtactggttgtagaaaagcagaaaatcaacgatggctaccgtcaatggcgagactacaatgagtcagttcatgttaatgcagattatttttctagcaatttgctacgaaaaaaggattacaaacaaacttttaataatctgaataaacaggctgagtatttggccggtgtacaaaatggtgaagtatttgattcgcctcaagattatttgcaaaattccaaaaagttagtgcaaacgatgctggcgggttatcaaaataattatcgcggtgcttcaacgctaaatgttccaccgaagtatcaactgcaacaaaaattagtagtttatgattatttgtaccaacatcacttagcaattgtcatgaattctaaagaatctagcacctacttaatctatattttaggattagtcggcatgttcttatttttctacgttttatttattgctagtgatagctggatgattaatttatcacatccaactctgcttaaaaatattccttatcagattagggatgaagttgaaggcaaatttatcatcaatcttgctttgactttgcttccgttagtgattggtgtgttaggaagttacttatttgctggttttaagaatggctttaatagtttgaattatccagcagttttgtatttcggtaaaattagcgcggttccactgtggctttattgtttgttgtatttagtctatgcagttgtactagtgatgtttgtgactagcctggcattgttgcttaatcaattaactcatagcgtttatctaacgatttttattgcggcattggtctacagtatttcacttttaccgggtagcattgctaaatatcttttctttttaccttcagcttatctaaatatcagtaaggttttagatgggactgttgcaagtcaatcaattattccggcaaattgggcagttggtatgactattttactagtgtgggctgtagtgctggtaatctggttcaggcatttggttaaccaaggtggtgttgaaaaatgaaaaggcaatattttttatttcaattaaaaatatttttgactaatcctaaaaatgtggggctgtttttcattaccgtcgtgcttgcactttactttggtttagtcagcgcaccgcagcatcatgtgattgaagatgttgatccatatgcaatttcaaaagaatatcaagatgatcaagcctttttaaaggtggctgaaaaagaatttgcacgggcagataaaggtacttcggattatgatcccagtgaaggtgctaaagatgctgttaccacatatccgaccatcattaagtatgaccatgagcgtttaaaagcacttaagaatcatgattggcgtttgtataccaaatacagtagcaagtggtatcagaaaatggataatttgatttgggttaaagaaaatcagaattacatgtatcccttggaatactaccacaataataattacaaagaagatggacattttgggtatcaaagaacatttcacttctatgatggtttacttaaaagtaaagcaaaattagacaaaaatgttttagaagaacggactactttacagagattacagcagtcgctttctgggtggacgatgattattttaattgtgattgttgttttgtttgcggcagatatgataaccaatgatcaaaaataccgtacagtagtgaagaatattcctctttctaaaaggacaattctttggctaaaaactgcggttattgaagtgggaattttatttaactttctagttgcttttttagtcgttacgttgtgtactgcgccaaggtatggttttggctcctttaatttattaacgccaatttatactggtcgtctgtatttcaaaacgccctttgtttatcagacgctgggacaatattatcttggtttcttgatctttgcagttgtaattacctttattttcattagattgactttattattgtcgctgatttttagaaatgaatatgtagcggctattatttcaagtgttttggcaatgagtgctaaagttctttatttttcattgggtatgggctttgtttatccatttttgaaacacttaccaatgacatattttacaatcggcgaaagtttgactagtaatttatcgtatttaatggactcaccaggttgggactttaatgatgggattattccgttagttacattagcaattgtaattgaattaactatttggctattttgtcagtttagaaaagtagtattagtgaagtaggtgaaaacatgttaaaaattcataatgttaaattagcttttggcgaacatgttgtcttagatgaaattagtttaaattttcaaataggaactatcgtaggtttagttgcaccaaatggtacaggaaaatccacactactaaacgtaattttacataatcttgagccacaagctggttatgtagaatatgatcatttacgttatcgcagcaatcgtgagattattaaactgcatcgactgatttgtgcttttcctgatcaaagtgatctgtttccatttatgagcggtagggatcatttaaagctttatgcggatctttggaaaaattcggataaaaatgtagataatattattaataaattacagatggaaaaatatgttgatcgcccaacacaaacttattctttggggatgaaacaacggctttgttttgccatggtggttgcagctgatacgccagtaatgcttttagatgaggtgatgaacggacttgatccccaaaacgtacaattgatttcagattacttattagatctaaaaaaagaaaataaattgattattatggcttcacatttgttaaataatctacaatcttacgcagatcgtgtacttttcttgaaggcaggaaaggtaattgaagatctcgataatcaacatcaggctaagcagtatctgaaaattgaggcgaatgcaatagccgggacgcggttaaaagataaaagatttactaagttacctgataataaaattattgtgccactggatgataatctaggattagatcaacttatacttaaattgactaaagagaagattccatattcagttggtcgaattgatttggcagaattatttagtaaattttatggctaaggcaatttgattagataaaaatagctcagttcgggtcattcgtatgatttgaactgagttactttttacttattttgcagtagtttttgcaggtcgttctgtacttgcaaaagcaatattattttctcgtaaaatttgaatatattgggtcaaatacaaatttttcacagcagattgtttaccaggcttaacttgaaaatgaatggaataaacaaattttttccctgtttgttcggtcacaccgacaatagtaggacctgatacaattgtctttttctcaggctggatcttacgattgcattctttgattaacttgttaacttcatcaatatcgtttttggtatcaagatccaaattaatgtctagtgctacaccgccatgggctaggttttgcacaatggtaatgttgcggttagggatgaaaataattgagccatctgaacccttgagacgagtagttctgaggcctagttgcacgacggtaccaacattagtgccaatctgaactaaatctccaacatcaaattggtcttcacttagaataaagaaaccgttgaccaaatcactaacaaagccttgtgcgcccattcctaaagctagggaaaaaattccagcactggctaacaaggtgccaactggtacacctagaatagagagaataccgaataaatagaagaagataagggtatattgaaaaacgctgttaatcaaagctgtgatagttcgagttcttttattcttaactgtgttatgcttggctaagtaattattaattattttatgaccaaaatgggataaaaggtaaaaaatgagtgaagtaatagctaattgccaaataattgacaataaattttggctaattttactccaatcaatttcaattttctgtatatttatgtgagtaggaatcttcatttggtgtcctttctattgcttacgggtataattaagaataacaagacattaattgagaataaaggatattcatgctaaactttttttagatgttgatggaggtagaaaatgacaatttcttatggtgctttagcaggcttaattgcggcgattgcattcttaattttagtattatttacgattccaatgctaattcggaccgcgaagttgttgaaagaaactagtgcaactattcaaacaactaacgagtcaatgaagaaaatttctgaagatatggatggcttgatggatcaaacttcggatttgttagataaaactaatgacctaatgaccgatgttaatggtaaaatgaagacgttagatccagttgttaaagctgctgcagatttaggcgaaagcgtatcagaattaaacgattcatctaaaaagatcgctaaacgctttagcagcaatcatttaagccgtacgggtcttatttcttcaatagctgcgacggcatttgcaagacgcaagcgtcgcagaggtgaaaattaataaaggaggaattcaccatgaaaaaattcgcaagtttcttattaggtgccgttgcaggatgtgcagcaggttttctcgcaggttcacttcttgttagtgatgaacaagttgatgacgttaagaacaagattaaagataatgacaagcttcaagatttgaagaagaaatacgataatggtactgaaatcgttaagaatcaattagcatcattccctaagaatgttgaagatgattcagaattgaaggattttgacgacatcgtaatcgatgactcaaataaagatgacgatgacagtgaaaatgctgaagagtcagttaacgatttgaacaatgctgaaaaagatgatactgatgcagcatctacttcagaaaaaccacaagcttaattaaagtcaaaaagaaaaggagctggtcgtgatgatcaatgtcattaagttaagacattgacaaattatcgacttggacttttaagatcattcatttgcgatttatcgcatttgaatgctcttttttcatgccaaataaacccaaatcttgtttagaaattaggctacacgatataaataatatacagctgatttgggtttgagatttcttttgtcttttcgtcctggtctgatcggaattgtgtaatgactaatttgaataagaatctttttaaagatttcagttgaagaagaaattatatacatagcctggatgacaaaacatgactgtttgaaattgatcgcatattgatacttgcattttttttgtggtacatatgcttgagcatcaatttgactgactgcgttaaacataatcatgtgggcatagatctccatttcaataaatctatcctgcttggaatgaaactgtacgctacctaaagcatatttcaactttttgaatgaagtttcaatgccccagcgcaaatggtagatttctttgatcctttttaagggataatcggctctatttagattagttagaacaacttcccattcttctttgcctgatttaggatcattaattctaaatttacaggcacgaaattttattgtacataactctccaaagtcccagctgccatctttggtatttttagaccgatattttatatattgacggtaatgatggttaaccaaatgaacgttttctgtagccttatgggtttcataataataattagaggtagtcacccagcaagctatatccttatcacactcttgattaggcaactcagctacttccttaaatgcgccatatcccgttttagtacgtatgacataataacagttaggcaggcgattacaattttcaatcatgttaaagccggtataacctcgatccatagtaactatatatggtccgcaatttagctttttaagcatttgaacggcggctttacgttcatccatctttgacttaggctgaaagatgcagtcttgataagtattatttaacaggtcatagagtgcattaacatgaatttggcaatatggctttcctttatgattgagatttccaacgatattctctgatttaggattccagatttgattaaaatcagacccatcaatggcaaatatacgatatttatgatcaaataactggatattaaataaattctgattaaatacagttagaatatgcttaaaacatgcgggtgaaagctgacctttgcgttggacataagcggaagtactgactactttatcgttatttttaatagctttttggccaaaagctctaaacaactcactggtcaaatcttttccttgcatattaatagtagttttaatgactgtagctgcatctaaaaaccgcttcctagtgaaggcatgaggatcatcgataaaatcatgaatatgctttccagtatcattgataatttgatcaagacgatctaaaatatttctgtgaagggctttcataattaacaccagctttctggcaataattttgaaggtttaataatttaatcagagggcgaaaaggtaggttcttttcgcctttattttatgcaaaaaaagaaccaaatcataatgattcggttctacagagattagattcaatttgtcaatgtcttaacttaatgacattgtcgtgatgatcagctccttttttatgactaaaattagtctttaagtggtaaaacttttaagtctttgtcagtgtgagtaaaggtttcaaagccgtccttagtaacgacaccacaatcttcaattctgacaccagcaaagccagggatgtagatacctggttcaatggagaagcacattccttcttcaagaactaagtcgttaccttgtacgattgatggatattcatgaacgtttttaccaatgccgtgacctaggcggtgaatgaagtattcaccatagccagccttagtaatgatgtcacgagccacgctatctaattcttcagcggtgattcctggcttagcagcttcgattgcggcttgttgagcttcacgatcaacttcataaatttcgcgttgcttagcagtaggttcaccgtaagcaacagttcgactagaatctgatgcgtaaccatcgtgcatggtacctaagtcgaataaaactaattcatttggttgaacagtgttcatagttggaccaaggtgaggattagcggcgtttttaccagcttgtacgatggtttcaaaactttcatgcataacacctttttgaatttttagttggtaatcaatttgaccagcgatgcttctttcggtgacgccagttctaattgcgtcaaagccaatcttaaaagcgaagtctgcttctgcaccagcgccttgcaacttcttgatttcttcaggtgtcttgtaaagacgaattttttcaataaaaggtgaaacatcattagtaaaactagcgttaggaaattcaccacgtaagagttggtagtgggcaacagacaaatcatctttttcaattgcccaattatgggtatcgtgagttctctttttgacattagttgcgatgatgctccaaggattctcggaatcaagatagccgataacatcgccatcccatgcagatgcttttgcttcttctacgtttaaagctgggcagaaaataaatggttccgcatcttttaaaacaattaaagcaaagattctctcatgtggttccattgagtaaccagtaaagtaggaaatggtgattggattagaaatgtaagcaagatcattattggagtcttgcaaccattgttgtaatttatctaagttcatattgtcctcttttcttgcaaattatgtttactgtagtatatcatgatctcttaatgaaaaaatgaaagaaaagctgtaaacgtttgcattttatgcagcatcgtgatatctttaagtgaaggattttttggaaggactgagagataagagatgcataaacaagaagttacaatctatgacgtcgctcgggaagctaaggtttcaatggctacggtttctcgtgttgtgaatggtaatagtaatgttagaaaagagacacgtgaccgtgttctcgaagttattaaaagactgcactatcaaccaaacgctgtagctcaaggtttagcttctaagcggactactacagtagggttaattgtcccagatttaactaatttatactttgcagaattatctaagggtattgatgatattgcacttttatataaatacaacatcattattactagtattgaaaaccgcttgatgaaggaagatcaagttattcaaagtttgctgaataagcaagttgacggtgtaatttatatgtctaaccgtttatcagatgcagcagctgatgcctttaagcggactgatactcctgtggttttagcaggtactaaagacaatcgtgatgattttgcttctgtcacaattgactataagaaggctgatactgaagcattaaatttgatgtaccatgatggtaagaagcatttgggaatcgtagttggtgatcaagatgctgtagttaacagcgaaaacagaatccctgcttatgaagaattcatggaagaaaatgatttgggcactcctcgaatctatactgatattaaagactattcagatggttataatttatacccacaattagttaaagatggcgttgatggtgtaattgttactcgcgatatttcatcagttggtattttgaattctgcgatggatgcaggtaagaaagtgccagaagatttggaaatcgtgaccgccagtgctacgcagttagcttctgttgttcgtccagctttgactacgattaagcagccactttatgatatgggtgccgtagcaatgagaatgttgactaagttgatgaacaatgaagaagtagatgatactcatattgttttgccatatgaattagttaaaaagcaaagtactttaaatcaataattaagtgaagcaaaaaagaccagtttactggtctttttgttttagtagataattttgttaatctgttgaagcttttgtgtaaaagtggttggtgcaattgcttgattaggattatagggcaaaagcacgagattagtgtactgactgacccgtggtaaggactgataatctctgaaatcgtcttgactaaagaagccatagaacaagatatcttttgccttaacccaacctagtttggtataaatccacatgtttttaggactaccattaaaattttgaatttttaataattgatttgcgggtaatttttgctgcgttttggcttggttatcaggataacgataaattgtaactttttggttaggtttagcgataattttcttattttgataaggagcaatatctcgctttgttaagtcaaaattaacgaattctgccgaaataaaagttttttcagcaatttgataaaataagcgatcatctacacggacgccataagtgacattgactttttgacctggttgcacgtacttcttttctttgatgcgaacatacggattcatcattgtagcggctttagttttaccaaaataaattccagttctattaatagcgtactttttagtgccacttttggctaatttatatttaaaaccagtagcgggatagttggtaaccacgccatcaacattccgattaattagccaatgccatagggcaggcgattcgtccatttcggcccagacaaacagttgcttatgtaatttgtgaagccagtgaattaaaaagggatgctcttgcacaatgtcagaagaagcattgatagcattaacttgaggtaaattactgaaattaatgcgtttcaggctaccaacgatcaaaattagataagcttcaggcataatttttctaaagtgaaagagactagcagcggaaaatgaatgaatcatgattcttttctgcatatggtattttttaactatttgtgcgattttatcctctaactcataggacggatttaatccatgatcaattttagtctctaagacaaatttagtgtttggtttattttgataatgcttaaaaagctcactgagtgacataacgtgttcgccattgtcatattgcagttgtttaagtgctgtaaaattattttgtgatacaattgcatgtgtatgagtaactcggaagaggtcatcatcatgtgcaatgaccggaactccatcctttgagagctggagatcgagttcaacgtaatcagcaccagaattaaaggcggaatcgtcagcctgaattgtttcttcaggatatttgatgggatcaccacggtgccctacaactgtaaaaccactatttatgaaaaagactaagctaaaaaaaagaacccaaacgagtcggcttttaaatttcatgtgtacacctctatcgcatacttaacaatagcatggttacacatttttttctatttatagtactattcttttatcagtaatcggtatgattgaaatctaaaggatgagatttaatggaacaattggacttaattgaagaagttaccagaaatgatggcagtcgatattatgaaatctctaatattgaccaaaatggaattgcagaattagctgcagatcatggcttaattaaaaaagtcaaaatactgcagctgaatattcctcgaactaaggcactgattgcttatgaaaaatatatcaatgatacttatgacttgcagactttgactaatgaaagtgattggaaaaatccaaaatgggtagaatgggataaacctaagggaaaaattttagacgcatataatatgatcttaaaagccaatcgaattggttagaaagtggcataaaaaatggaacaactgcgaattttacataccaatgatcttcattcacattttgaacatttccctaaaatcggacgttacttgaaaaaagcgcaggctgatcaatcggttgatggtatctacacttttgatgcaggagactttatggatcggtctcatcctttaactgatgctacggaaggtcaagccaacatcaaattgatgaatgggtttaactatgatgcaattacgattggcaataatgagggaatttctaatccacattgggtattggaacatttatttgatcatgcggactttccgacagttttagcaaatttgcgtgaagaagatgaatcaatgcctaaatgggcagtcggccatatgtttttaactactaagaaaaagacgcgaattgctttaattggcctgactgcagcttatccaatgacttatggtcctaatcattggcatgtcaagatgttaggtgacagtatggatcacgaattagctcaaattgaaggaaagtatgatgtcttaattttattgactcatgttggattaaaaatggatcgctggttagctaaacattatcctcaaattaatttaattgtaggaggccacagccatgatctgattgaacatggtgaaaaagtggggcatacttggattacgcaaacaggtaaatggggaaactatgtgggtgatattcatctagaacttgaagatcatcacgtgattaaggtagtacctcgcactatttctactgcttcgatgccagaagaaccggaagataaggcagtgattcagggctactatgatgaaggtaagcgacttttatcagaacgaaaagtggctaatttacctgaaaaatttgcggatgataaagtagcagccgttcaagtttctcttgatgcgattgctgattttgctaaaacagatttagccattttaagctcaggcctattcttgcccccgtttaagagtggaataattactcaatatgatttacaaaatgccttaccgcatccaatgcacgttgttcgttcaaccttgaaaggttatgatttgtggcgactagtgatggaaattgaaaagaatcggcattacctagaccattttccactgcaagggatgagttttcgaggaaaaatttttggtcagatgtattacaaagggatcaaggttgatatgcgtagacgtgtagtttacgtcaatgggcatgaaattgatccacaaaaagaatataaaattgcctgtttggatcattatgtcttagttccattttttccaactttggctattgtcggtgaaaatgagtttttattcccacaatttttacgtgaagttgttggtaaatatttggctgaaaaatatcctttaacagcgagaagtgaaaaagatgactgaagaaaataaatttgaacaagaacagccaattagacacccacttgctgacgtggtgcaagatggtaagagcattaagattggtgcgcagctttatagcatcattgtcaatgagcgagacgcacttgatttagaatctttgcgtaaaaaatatgatccttatcttgaccagtatgattatctggtgggggacgtttctagtgaacatttacgcttgaaaggcttttataaagacggtgctagaaccgcaattgataaaaaagaaatggcgatcgtggattatttaacggaatattgtaatcccggcggaccttattttatcttggaattaacgcatccagtacattattatcagcatcaacgtactaaaatacggcgatcacgtgaacgacgcgagcgcgattttggtaaaaatgagcgttatcatgcacgacgtcgaaattatcggaagaataaaaatgaaaataatccgtttaagaagcggcgtgttcatcaaactaaatttaagaaaaaaacaatcaattgcagtgaaaaaagaatttggacggcatcattcatttattattaaaaagagaaagggaaactagtgaaagattaccgggtatttttaattgacttagacggaactgtttatcgtggtaaggaaacagttgaatcaggagtaagatttgttcatcgtttggttcaagcagggaaagactatttgtttttaaccaacaatacgaccagaacaccgcaaatggtagttgataaactaaagggacacggtatcgaaactgatacggaccatgtttatacgccaagtatggccacagctagctatattttacaaagagaacacaaggaaaagatcggcttgtatattattgggcagattggtctctggcatgaattattgcaacatccagagtttgagcttaatgaagaaaatcccgattatgtaattgtcggtatggatacagatctgacttatcataaagtacgagtagcttcacgggcgattagacgtggagccacttttattgggactaatgccgatatgaatttaccagcagaggatgagctaattccaggcaatggttcacaatgtgcattcgttgctgcagcaagtggagtagagccactgtatattggtaagcctgaatcaattattgtaaaaatggctttggataaagttggctatagcaaagatgaggcacttttggtaggtgataattacgataccgatattaaagctggctttaatagtggagtagatcagttgttgactttgacaggtgtgacgaccaaagtggatattgcagataaacgtcaaccaacaattttagttaataacctagatgaatttgaattatgattactaaaaacaatattttttcgctgatttatcattttttgtttgctgtttctagcagtgtaattggggcaattgtggctagttggccattattgtttatttttatgatcgtacaaaagacatatgagacggttcacatgtctttgtttaaggtaatgcataattataaccagctgatgttttatttgctctggccctttaaaaagcagcttaaaatggataatttccctacatctgctaatgcggcagaacattttgcggaatgtaagcatttatttattctgactctattagtttttattatctgcatcatagtgcactttgtttttaaacgacaaaagaaaaagctactgcttaatttggataaatcagtagcccttattttgctattattgccaattattatttttccatttgcagtaaccaatttcgacagtttctttgtgatttttcaccatattttgtttaacaatagtgattggctgtttgatcctaatactgacccaattatcaatgtgctaacggaaggcttctttgcttcttgttttgccgttgctggggttatttatgaattatattttgctgaaaaattattacgtaagtaaaaaagagttccttagtggaactcttttttgagtgatatttttttcttgattgcgacaattgcgattggcacaactgatactaaaatgatagcaattacgatcattgaaaaatggtcctttacaaatggaatattgccaaagaagaaaccgatgattgtgaacaatcctgtccaaagcaagccacccaagatgttgtaggtgataaatttaccataatgcatcttactgccgccggaaatgaatgggacaaaagtacgaataaatggtataaatctacctataacgatcgtaattggtccgtggcgctcaaagaacttttcagcggccaaccgattattttgattaattaatttattgaaccagctatgtttttcaccagctctggttgaccaggcaccaatttcatagttgatactgtcaccgattatggcggcgaatgctactataagataaactagccaaatatttaagccatacttaggattagcagccattgcactcgcagcaaaaatcaacgaatcgcctggaagaaatggaaaaacgactaagcctgtttcaataaaaatgatagcgaataagattaaataggaccaaccaccgaattggttaacaatcgggattaaatggtcatcaatgtgcaaaataaaatcgattaaactcatctggaactcctaaaaactagttgaatgaattgtcaaagttttttcagggaaaagatcacgcataatcgcggtgattgcaatctgggcttcgccaaaaccgagagcgattaaagggacgcgtccaagataggtaacaacatcgccagctgcataaacaccggcgatattagtttgcattgttgaattcaccttaatttgtgcgccagctaaatcgattccccattttttgacaaagcgattattagctttaaagccatatgcaacgactgcttggtctaacttgatattagttaagctatcttttcccatttcttttaaattaacgttcagttgattatcaaccaaattgatttgtttaggaagataaggagttaaaatttcaacattttttaaagacttaagttttttgacattagattcaagaccgcgaaattgattacggcgatgaatgattttgacattggcataattagctaattctagtgccaggtctaatgctgaatcgccgccaccaaagacgccaactgtttgtccgacaaattttgggggatctttaataaagtaatgaatccttttttgagtatcatcatccatagataatggtaaagctttaggtttaaaggcaccggcaccagtggtaatcaatatgctgcgggatgcaactatatcatcgataataaagccgtctttttgtttagtgacattttcaactttatggttagtaaaaatagttgtatccgttaaattatgtcgtaaattgtcgattagttcagttcctgtaatagagtcgtaagcaggaatatctttgattttcttaaaaggataaagcatttgtggctgtccgcctgtttcagataatgaatcaaacagtacggtcttgagtccatgaagatgggcaaatcgcgcggcaaataggccaacaggtccgccaccgataatagttaaatcaaattttttaattttaatgacctcctcaaagtagtgatgtatcaactttaacatgaattttgtaaatattcatttaaaaataagcttgtcaaaaaatgaattttaaggtatattattgaagtcgcctttttaagagcgagcataattctttattgaaaaaatacttgcaattaatattcaagtattatacattaataaagtcgcttcgagagatgcgacgagagcttaaaaacagacatgcaaggaaagaaaacaaataaaaagaaaaaagtacttgcaaagaagtaaataagctggtaatatatttaaatgtcgtcaggtgaaagcagaaaaagcttgagtaagacgaaaaaacaaatcaaaaaagttcttgacaaagaaatgatggtttgataaaatatgaaagctgtctgctttgcaaaaaagcaagacagaggtagtactttgaaaactgaacaaagtttcgctaaaagtgtgcgggtgtaaaaacccaaacaagaagcgaagtcaattcgcgagcaataaatttgagacaaagatcttaaataaggaatgagcaatcattcaaactttttaaaatgagagtttgatcctggctcaggacgaacgctggcggcgtgcctaatacatgcaagtcgagcgagcgaaactaacagatttacttcggtaatgacgttaggaaagcgagcggcggatgggtgagtaacacgtggggaacctgccccatagtctgggataccacttggaaacaggtgctaataccggataagaaagcagatcgcatgatcagcttttaaaaggcggcgtaagctgtcgctatgggatggccccgcggtgcattagctagttggtaaggtaaaggcttaccaaggcgatgatgcatagccgagttgagagactgatcggccacattgggactgagacacggcccaaactcctacgggaggcagcagtagggaatcttccacaatggacgcaagtctgatggagcaacgccgcgtgagtgaagaaggttttcggatcgtaaagctctgttgttggtgaagaaggatagaggtagtaactggcctttatttgacggtaatcaaccagaaagtcacggctaactacgtgccagcagccgcggtaatacgtaggtggcaagcgttgtccggatttattgggcgtaaagcgagcgcaggcggaagaataagtctgatgtgaaagccctcggcttaaccgaggaactgcatcggaaactgtttttcttgagtgcagaagaggagagtggaactccatgtgtagcggtggaatgcgtagatatatggaagaacaccagtggcgaaggcggctctctggtctgcaactgacgctgaggctcgaaagcatgggtagcgaacaggattagataccctggtagtccatgccgtaaacgatgagtgctaagtgttgggaggtttccgcctctcagtgctgcagctaacgcattaagcactccgcctggggagtacgaccgcaaggttgaaactcaaaggaattgacgggggcccgcacaagcggtggagcatgtggtttaattcgaagcaacgcgaagaaccttaccaggtcttgacatctagtgccatttgtagagatacaaagttcccttcggggacgctaagacaggtggtgcatggctgtcgtcagctcgtgtcgtgagatgttgggttaagtcccgcaacgagcgcaacccttgttattagttgccagcattaagttgggcactctaatgagactgccggtgacaaaccggaggaaggtggggatgacgtcaagtcatcatgccccttatgacctgggctacacacgtgctacaatgggcagtacaacgagaagcgagcctgcgaaggcaagcgaatctctgaaagctgttctcagttcggactgcagtctgcaactcgactgcacgaagctggaatcgctagtaatcgcggatcagcacgccgcggtgaatacgttcccgggccttgtacacaccgcccgtcacaccatgggagtctgcaatgcccaaagccggtggcctaaccttcgggaaggagccgtctaaggcagggcagatgactggggtgaagtcgtaacaaggtagccgtaggagaacctgcggctggatcacctcctttctaaggaagcgaaggatatggagagcaggaatgctaagagaagtatccagagcaagcggaagcacactgagaaactttgtttagttttgagggtagtacctcaaagatttgaaaaacgccaagcgttagtcgggcctatagctcagctggtttagagcgcacgcctgataagcgtgaggtcgatggttcaagtccatttaggcccattgacataacgaagaaaaagagttaaagttatgtctggccgaaaataaaatactctgggggcttagctcagttgggagagcacctgctttgcacgcaggaggtcatcggttcgaacccgttagcctccattgatccagaaaaaggatcaaagagctagtacattgaaaactgaatataatccaagcaaaaaaccgagacaatcaaagagaacagattgtagagcgaccgagaagagaattcttgagtaaggtcaagtagaaaagggcgcacggtgaatgcctaggcactaacagccgaagaaggacgtgacgaactacgaaaagcttcggggagcggtaagtacgcagtgatccggagatatccgaatgggggaacccaatgcagagatgcattattgattagtgaatagatagctaatcaaaggaagacgcagtgaactgaaacatctaagtagctgcaggaagagaaagaaagatcgatttccttagtagcggcgagcgaagaggaaagagcccaaaccaagtgatttatcatttggggttgtaggactgcgacgtggcagtgtaagagatagttgaattatctgggaaggtaagccagagagggtgagagccccgtaagcgaaatctcaagcacgcctagcagaatcctgagtaggccgggacacgaggaatcccggttgaaaccgcgaggaccatctcgcaaggctaaatactagttagtgaccgatagtgaaccagtaccgtgagggaaaggtgaaaagaaccccggaaggggagtgaaaaagaacctgaaaccgtgtgtctacaagtagtcaaagcacattaaagtgcaatggcgtgccttttgtagaatgaaccggcgagttacgttatctagcgaggttaagtcagaaaagacggagccggagcgaaagcgagtcttaatagggcgaaaagttaggtgacgtagacccgaaaccaagtgacctacccatgaccaggctgaaggtgtggtaaaacgcactggagggccgaacccacgtaagttaaaaattgcggggatgagttgtgggtagcggtgaaattccaaacgaacttggagatagctggttctctccgaaatagctttagggctagcctcgtggagaggataatggaggtagagctctgtttggactaggggcccgtcaggggttactgaatccagataaactacgaattccagatatccatacacgggagtcagactgcgagtgataagatccgtagtcgaaagggaaacagcccagatcaccagttaaggtccccaaatctatgctaagtggaaaaggatgtggagttgcgtagacaactaggacgttggctcagaagcagccatcattcaaagagtgcgtaatagctcactagtcgagtggcgctgcgccgaaaatttaccggggctaagcatagtaccgaaactgtggatgtgttttaaagagcacgtggtaggagagcgttctaagagcggagaagttgaatcgagaggatcaatggagcgcttagaagtgagaatgccggtatgagtagcgaaagataggtgagaatcctatccgccgaaagactaaggtttcctggggcaggctcgtccgcccagggtaagtcgggacctaaggcaaggccgagaggcgtagtcgatggataacaggtagagattcctgtactgtgtcaaatcgttaagagcgaaggagggacgcaggaggtgaagcacgcatcgcgatggaacgatgttcaagcaacaagtgcggttaagagtcaaatgcttctaaccagcaacacgagttgtgaagaggagtgaattaaaagtagcgaaggtgtggtaatcacactgccaagaaaagcttctagccagagatgacatacccgtaccgcaaaccgacacaggtagtcgagtggagaacactaaggtgagcgagagaactctcgttaaggaactcggcaaaatgaccccgtaacttcggaagaaggggtgctagccaagagattggttagccgcagtgaataggcccaaacaactgtttatcaaaaacacaggtctctgcaaaatcgtaagatgacgtatagaggctgacacctgcccggtgctggaaggttaagaggagagcttagcgtaagcgaaggtttgaattgaagccccagtaaacggcggccgtaactataacggtcctaaggtagcgaaattccttgtcgggtaagttccgacctgcacgaaaggtgtaatgatttgggcactgtctcaacgagagactcggtgaaattataatacccgtgaagatgcgggttacccgcgacaggacggaaagaccccatggagcttcactgtagcttgatattgagtatcttttaaacatgtacaggataggtaggagccagagaagataggacgctagtcttattggaggcaatgttgggatactacccttgtttgaaggatgctctaacctcgacctgtaagccaggccagggacagtgtcaggtgggcagtttgactggggcggtcgcctcctaaagtgtaacggaggcgctcaaaggttccctcagaatggttggaaatcattcgcagagtgtaaaggtataagggagcttgactgcgagagagacaactcgagcaggtaggaaactaggacttagtgatctggtggtaccgtatggaagggccatcactcaacggataaaagctaccctggggataacaggcttatctcccccaagagttcacatcgacggggaggtttggcacctcgatgtcggctcgtcgcatcctggggctgaagtcggtcccaagggttgggctgttcgcccattaaagcggcacgcgagctgggttcagaacgtcgtgagacagttcggtccctatccgtcgtgggcgtaggaaatttgagaggagctgtccttagtacgagaggaccgggatggacgcaccgctggtgtaccagttgttccgccaggagcatcgctgggtagctatgtgcggaagggataagcgctgaaagcatctaagtgcgaagcccccctcaagatgagatttcctttgcgtaagcagtaagacacctcagagacgatgaggtagataggctgggagtggaagtcctgtgaaggatggagcggaccagtactaatcagtcgaggacttgaccaaagcgaagcaaactggaaggttttttgcgagaaggattatgtttagttttgagtgtaaaagctcaaaagagtacggtggcgaaagcaagaaggatacacctgttcccatgccgaacacagaagttaagcttcttaacgccgaaagtagttggtgggcaactgcctgcgaggaaaggaagctgccgtgctcaatatggaggattagctcagctgggagagcatctgccttacaagcaggaggtcacaggttcgagccctgtatcctccatatcgagtcgttagctcagttggtagagcaacggacttttaatccgtgggtcgagggttcaagtccctcacggctcatgaccctatatatgcgggtgtggcggaattggcagacgcgctagatttaggttctagtgttttcggacgtgtgggttcaagtcccaccacccgtattgccaaccacatattgacaatatgccgatttagctcagttggtagagcatctgtcttgtaaacagggggtcgtacgttcaagtcgtataatcggcatttatattacgcggaagtagttcagtggtagaacatcaccttgccatggtgggggtcgcgggttcgaatcccgtcttccgctttcatcaacacgccggagtggcggaattggtagacgcacgggacttaaaatcccgcggttggtttcaaccgtatcggttcgactccgatccccggcattgatgatgcgcccttagcgcaactggatagagtgtctgactacgaatcagaaggttgaaggttcaaatccttcagggcgcatataacgggaaatggctcagtttggtagagcacctggtttgggaccagggggtcgcaggttcgaatcctgttttcccgattgtaatctaatggtgattggttacattttggcggtgtagctcagctggctagagcgtccggttcatacccgggaggtcgagggttcgatcccccccgccgctataattgtaagcttggacctttagctcagttggttagagcagacggctcataaccgtcctgtcgtaggttcgagtcctacaaggtccataatatggcttttatattaatatcgcgggatggagcagtctggtagctcgtcgggctcataacccgaaggtcgttggttcaaatccagctcccgcaatttggtccattggagcagtggtttatctcgcctccctgtcacggaggagatcatgggttcaaatcccatatggaccgtaagatggctcggtagctcagtcggtagagcaaaggattgaagctccttgtgtcggcggttcgattccgtcccgcgccatttcattttatattaggtgcgggtatagtttagtggtaaaacgaaagccttccaagctttagtcgcgagtccgattctcgttacccgctttatatgggcctatagctcagctggtttagagcgcacgcctgataagcgtgaggtcgatggttcaagtccatttaggcccattggagacatactcaagtggctgaagaggcgcccctgctaagggtgtagatcgggttattccggtgcgagggttcgaatctctctgtctccgctatatagaaaagtaactgttctagattaatttctagagcagtttttttgtgtaccgagcggcattcttagtccgatgaaagtgttagaactaagagccagtagcaatgatattatgagtatgggacgtttacaaaggagtaaatacctgctgaaacagtaaggaattacaaatgtatcgtcttatatgcaaccatatgtatagtggatggaaggagatgagttcgttaagttctctctgcattgaaaacacgtcataagatgttaaaaccttaattttgagttattgataaacctaaatgcatattattttgaatgacttaatggaaattattacacttcttttaggtaaaagtcttggacattgattcaagtcaataatcgtgtatataacatagggagagccgattgttttaaatttcttcttgtatgatctatattaaaaaaataattttgtgggggatttcatagtgatataaagaagcagtttaatatggaacaatttataaagatcatttagttaaagataagagaagctgttttgctctagctaatttgaagtattaagatagatataaatgttttacaacaaaaaaataaaaaagtacttgcattttgactgaatatctattaatattaaatacgttgtgattgagagatcacaatagtaatagctaattaaaaaaataaataaaaagttcttgacttttgaaatgtgattagttattataataaagtgctcttgagtgagttacatgacccgttggtcaagtggttaagacacggccctttcacggccgtaacatgggttcaaatcccgtacgggtcattgccacaatttatttttttggcattaagcaatggaggattacccaagtggcttaaggggacggttttgaaaaccgttaggcggttctgccgcgcgtgggttcaaatcccacatcctccttagttgaatatcgcgggatggagcagtctggtagctcgtcgggctcataacccgaaggtcgttggttcaaatccagctcccgcaatttggtccattggagcagtggtttatctcgcctccctgtcacggaggagatcatgggttcaaatcccatatggaccgtaagatggctcggtagctcagttggtagagcaaaggattgaagctccttgtgtcggcggttcgattccgtcccgcgccatcatctggaggagtagcgaagtggctaaacgcggcggtctgtaaaaccgctctctctgagttcggcggttcgaatccaccctcctccataatagggatatcgtataaaggtagtacatcggtctccaaaaccgctagtgtgggttcaattcctactatccctgtttaccttcatggcggaattggtgaaggggttaacacactggtttgtggatccagcatgcgtgggttcgattcccacattccgccctagtattgggatatagccaagtggtaaggcattagactttgactctaacatgcgctggttcgaatccagctatcccaattctaaataatttcataacttatggcggtgtagccaagtggtaaggcagaggtctgcaaaaccttaatcgtcggttcaaatccgacctccgccttatcaaccgaataagttgattattttaaaatttaatattatggcggtgtggcggaattggcagacgcgtcagactcaaaatctggtgtccattacggacgtatcggttcgaccccgatcaccgctattattatgaagcgatccaattattggatcgctttttttttattttaaaatgttagcattttattatataaattgcacatgaatacaggaatctttataatgctacatatggaggtactcaaatgaatattggtctttataccgatacatattttccccagataagtggcgtagctacttcaattaaaacgttaaaagaagcgttggaaaagcaggggcataatgtatttatttttactactactgatccgaacgtgaaaaaaggaactgtagaaccgaatgtatttcgttttagcagtattccttttgtctcatttaccgatcggcgaatagcatttagaggactatttgaagcaaccaaagtagctaaagaagtcaatcttgatatagttcatactcaaactgaatttgcattaggtactattggcaaatatgtagctcatcaattagatattcctgctatccacacttaccatacgatgtatgaagattacttgcactatattttaaatgggcatttgcttcgtccatatcatgttagacaatttgttaaaagctatttgaaaaatatggatggatgtattgctcctagtggccgagttgaagaattattacggcgctatggcgttcaaataccaattagggtgattcctactggagtagatttgcagggcatgaacaacgatattcaacgtgatgtgcggcaagaacttggaattgatcaagatgcgcctgtaattttaaccttaagtagaattgcagccgaaaaaaagattaatcatattttgaacgtaatgcctgaaattattgatgaatttcctaatgtgaaatttgttatcgcaggtgatggccctgatgttgatgtgttaaaggatcaggtagagcgattaacactagagaattacgttatttttgtcggtaatgtagagcatggcgatgttggtaattattatcgaatggctgatctttttgtttcagctagtgatacagaaacacaggggttgacttatattgaggctctagctgcaggtacgccatgtgtggtttatgacacagactataccgaaaacatttttgatcaagatatttttgggcagacatttactacacaacaagaaatgttagaagagattattactttgcttaagcaagggacgaaaagaatcccgcaggaacttttgcaaaataaattacagaagatttcagctgatcaatttgctaaaaatgtgtctgatttttatcagtatgcaattgatcactatcaacctaagcatgatgaggagactaaaaagaggaactaaatgattagaattaatatgttctcgcaagctgattctgttaaaggacagggtgtaggttcagcttataatgaattgattaaacttctgaggacgcacttagtagacgaattttatgtaacgattaacaaatatggcaatagcgatttaacgcattatcacacgattaatccaacctattacgcaaatagttttttaccagcacgtggcaggaagattggctatgttcactttttaccagatacattagaaggctcaattaagttgccaggcgtagctaaaaaagttttttatcaatatgtaattgatttttataaacgcatggatcaaattgttgtagttaatccaatctttattgataagttggttaactatggaattgatcggaacaaggttagatatattcctaattttgtttcaaaaacagaattttatgaagaatcattggccagcaaaaacgcatttcgtcatgaattaggaattccacttgataaatttgttgtttttggtgatggtcaagtacaggaacgcaaggggatcgatgactttgttaagatggcacaagctaatcctgatattcaatttatctgggcaggcggtttttcgtttggcaaaattactgatggctatgatcattacaaagaaatggttgacaatccacctaagaatatgacgtttgcgggaattgtagagcgagagaagttagttaagtatttaaatattgcagacttatttgttcttccatcatatgatgaattgttcccaatgtcagttttggaagcattcagttgtggaacaccagtattattgcgtgaccttgatctttataaggcaattatcgatggctattatctaagcggaaaagattttggcgaaatgaatcaagtattgcaaaaagtagttgccaatccacaaactttgcagaaatacagcgaattatcgcgtaaggcaagtcaacagtattcagaagatcatttagctaaaatttgggacgaattttatcatgagcaatatgaattaggaaaagagctaggtcaaatacattaatgaataaaaaacatttgtggggcattctggttgttttagcaatcagtgcctttgtgctatatgcagatttaaaagctacaccgatatcggaaatattacgggcagctcatggcctgaatatttttggattaatcatggtttttgctttaatgcttttgtcctatgtatgtgaagccggtatcttagctactttagctcatcgaaagaaagagcctaaaaggtcagcttggtcgtttttgcgaattccaattattcaagctctatttaatgcaattacaccaatgtccacgggtggacaaccatcacagctagccgcaatgattcaaatgggcatggaaggtggccgttccacctcaattttgctgatgaaatttattatttatcagatcgttgttttgtttgcctatgtatttacaattatttttggctttcatatggtaatgactaagttcgctggtttagcaatttttattgcaattggctttttgattcatgttagttcaattatctttttgcttgcaattatgtttgcttatcgttttactaaaaaggcaactaattggttaatggacttgttggcaaaaatgatgaaaaaggaacgagttgagaagtggcgtaaggcaactttagaaaagattgatactttttatgcagagagtcagaaactaaaaaaagaaaagaagaaattatttgttgcctcgcttttaacagtattgcagctacttttcttttactccgttccatttatggtattaacagcgctaaatgtaccttgttcttggtatcaagttacgcaaatgaatataatgattatcatgtttatggcgatcattcctattccaggtgcgtcaggaggggcagaatatagtttccaaacgttattctccaccttcatttcttcacatggtgcgttaattttggctatgtttatttggcgcttttcaacatattttttcggtatgcttctcggcatcttaggctggatttttaagccgaaaaagataaaaagcacaaaaatgattaatttttattaaaacaacggtgtcttactaaatttcgtagtaagataaattaccgtaatgagaggagcagaagcgcgtggaacacactaaatctttttttaggtggctgacacagactaagttaggcttttttacgattgttttagtcttgttttggcttaaaacttattttatctatttaactaagtttaatttaggagcagttggtccaatgcagcaatttttattgctgattaatccgattccttcagggatgcttttgctgggaattgggctattttttaaaggacgtaaatcctattggattattttagttatcgattttttgctaacactgtggttatttgccaatattttatattatcgcgaattttcaaactttttgtcattttcaattattaagacatcaggctcgacttccgataatttgggtaaaagtattgcaggaattacactagctagcgattttttagcttttgctgatattgctgtaattatcgtgttattggcgaccaaagtaattaagatggatgttcgtccactgaagctaaaagttaatttgttaattgaggctttggctgtcagcttaatgggactgaatttattgatggcccaaaatgatcgttctggacttttgacgagaacttttgataataattacatcgtcaaatatctgggaatcaatgaatacgctatttatgatggctataagacagcacaaactagtgcacagatggccaaagctaatgtttctgatttgaagtctgttagaaactatttaaaagaaaattacgttaaacctaatcccgcttacaccggcgtggctaaaggaaaaaatgtgttaatcatccatttggaaagttttcaacaatttctgattggctacaaatggaaaggtaaagaggtaacgccaaatctgaataagatttatcatcaaaaagagaccattagttttgataatttctttaatcaagtaggacaaggcaagacttctgatgccgaaatgatgcttgaaaattctttatacggactacaatcaggtagtgcaatgtctacgtatggtacttctaatacttttgaaagtgctccagccattttgcatcaacaagctggttatactactgctgtaatgcatggtggtgctggctccttctggaatagaaataatgcttataagtcatttggctaccaatactttatgccactgtctttctatcagaacaaaccaagctactatatcggatatggcttaaaagataaaattttctttgatcagtcaatcaagtacattgagcgtttaccacaaccattttatttaaagatgattactgtaacgaaccactatccgtataatatcgataaaaagaatcagacgattgataaaacgaatactggggatgaaacagttgatggttatgtgcagaccgcgcattatttagaccaagcaattggtgaatttatgcgttggatgaagaagacgggcctagataagaagacactagtagtattttatggtgatcactatgggatttcaggtaatcaccataaggctagtgcagaattacttaagaaagattcgtttaatgactttgataatttgcagttccagcgagttcctttgatgttccatatgaaaggactaaagggtggcattaatcacacctacggcggtgaaatcgatgttttaccaaccttactgaacttgctggggatcaaagacaaagatacgatccaatttggctatgacttgctaagcaaaaatgcaccgcaaattgtagcacaaagaaatggtgactttatcactccggaatattctaaggtgggtagcgattattatgacaccaagacgggcgaaaggatcaaacctaataagaaattaaaagaaaaattaactgcaatttctaacaccgtaactacacagctgtctttgtcagatcgtgtaattaatggcaatctgctccgattctataaaccaaaagggtttactagagtcaagccgaaggattacgactataacaaggcgccatctttaaaacgtttgtttgatgatccaagcaaaacttcactgtggtatcaaaatcatcgtaaaacgacgcaaaaagatttcaagacagatgcgcctgaactaaaaaaataactgcaaaaactagtaatttgtgataaacttggtaagtaaatcgtatgtgtgtattggaggcagcgcattgtataatttagttatgacgctactaatcattgtttcaatcttaattgtcattgcaacaatgatgcagccacaaaaacaacaagatgcattgaacgccttatctggcggtgccgtttttagtgggcaaaccaaaaaacgtggttttgaagcatttatggaaaaagtaacctcagttttattggtactctttttcgtctttgctattatcttagcttatatgtcttcaaaataaattttgtacctcccgatcaaaatatgatggggaggctttttttattaaatttaaagatcggagaataactgcatggcacaaaacgaaaaaattttggccggcgttttagaaatttttcgccataatccacaaaaacaatttcgtgtagatcaaattgaacgtgaagcacgtcgtgatagattaggtaattttactgaattaattaaggctctttcttttttagagcacgataaaaagattattacagatggcaaaggacaataccaattagctcaagaaaatactgaagttgaaggtgaatttagagctaatgataaaggctttggctttgttagattagatgatgaaaatgcggacgacgtctttgttgccgcagattataccaagtatgccgttaatggtgaccgagtaaaagtaaagatcactgctggtggtaatccttggaatggtaagggaccagaaggtcaagttgaagagatccttgaacatggtttggaaacgttagttggtgaatttcatccgctaactgatgaacaaagaaaaaacagtcattttatcggctatgctttgagtaacgataaaaagttgcataaataccgggtttatttgtctgaaaatggcttgatccctcaaatgggcgatatggttaaggtctcaattaaggattatccagatgaggaaaatcctgagtcaatgactggtgcagtagtcaacattattggtaataaaaatgaccctggcgttgacattatgtcaattgtggcagcacatgatgtaagaactgaatggcctgaagatgcaatggcgcaagctaatgctattcctgatcatgttactgaagaggaaaaaaagggtagagtagatattactgaccaacctgcagtcactatcgatggggatgattctaaggactttgacgatgctgtagttttatggaaaaagcctaacggcaattatcaccttggtgttcacattgcggacgtttctcactatgtgacagaaaatacgccgttgaacgaagaggcatttgctcgtggcaacagtacttacttagttgatcgggtaattccaatgctgccatttagactttctaatggaatttgttccttaaatgaaggcgtggaccggcttgttttgtcatgtgacatggaaattacgccagaaggtaaaagagtaggttataaaatttatccttctgttatgcgctcacatggtcgaatgacctacaacaaggttaacaaaactcttaagggcgaaatgaatggtttagaggataagtatgttaaactccgaccaatgcttgaagaaatggcagatttgcatgctgctttgtataaacaacgtcatcaacgtggtgctattgactttgaagaaccagaagcaaaaattattgttgatgatcaaggcaagccaacagatattgttttgcatgaacgtggtactgccgaaaagatgatcgaatcatttatgttaatggctaatgaaaccgtggccgaagatttcttcaaaaagcatgttccattcttgtaccgtgttcacgaaacaccagatgccgaaagaatcaagactttctttgaattttgtagcgcatttggcttgaatattcatgcggatccaaataacgttaagccaattgatttacaaaaagtagtttctaaaactacagatactccagaggaagctgtagtacaaatgatgatgctacgtagcttaaagcaagcgcattattcagaagaagcactgggacactttggcttagctgcagaatactatactcactttacttcaccaattagacgttattctgacttgatggtgcaccggatgatccatgcatatcaagaccaggggactaatgaagaagtgcaaaagcattttgctagttacttgccagatgttgcagaacaaacttcaacgcaagaaagacgttcaattgatactgaacgtgaagtaaatgacttgaagatgacagaatatatggccgatcaagtggggcaacactttgacgcggtagtatcttcggtaactagttttgggatgtttattcaattaccaaatacgattgagggattaatccatatttcgaatttgactgatgatttttacagttttaatgaaaaagcattgacgctaactggtcgaggtactcataagcaatataaggtagggatgccaattaaggtaaccttgattaatgctaacgttgaacaacatcagttagactttgaaatatatgatcctaatgcgcctaagcataagcataacgatcgcggaatgaataatcgtcgtcgtggaaaccgtggcttccgcaataatcatggacgccgtggtggtcagtttaataatcacagcgatcatggccgtggccgaggtaatggaaaccgtggaggtcggagaaattttaaacattagggattgatcttaatgaaaaaagaaaaagaagataatttaattgcacaaaataaaaaagcacgacacgactattttattaaggaaacattggaagcaggaattgctttaactggaaccgaaattaagtctgtacgagctagaagaatcaacttgcgggatggttatgtgcagatcgtcaacggacaagcctggctagaaaatgttcatattagtgaatataagcaaggcaatcggtacaatcatgagccactacgtagtcggcgccttcttttgcataaaaaagaaattgcacgtttggccaaagcacaatcagagcgtggtattgcaattattccacttaaagtgtatttaaaacatggctttgccaaggtattgattggtgttggccaaggtaaaaaggaatatgacaaacggcaaacaattaaagaaagagaccagaagcgcgatattcgacgcaagtatggtgtctaagatgagtctgagaagaatctcagactttttttgttgaaaaattttaaaaagtttttttattttcacaaagtaatgttcgaacaatttgaagaatgcagagaaaatcaagctaaatatttttttaattattatagaggcgaataatagtattaagatacgtttgatattgaaatattcatattaaaaatccgaacgaagagcaagacttgccaaagcggagaaaataaggtaaattaataaagtcgcttcgagagatgcgacgagagcttaaaaacagacatgcaaggaaagaaaacaaataaaaagaaaaaaagtacttgcaaagaagtaaataagctggtaatatatttaaatgtcgtcaggtgaaagcagaaaaagcttgagtaagacgaaaaaacaaatcaaaaaagttcttgacaaagaaatgatggtttgataaaatatgaaagctgtctgctttgcaaaaaagcaagacagaggtagtactttgaaaactgaacaaagtttcgctaaaagtgtgcgggtgtaaaaacccaaacaagaagcgaagtcaattcgcgagcaataaatttgagacaaagatcttaaataaggaatgagcaatcattcaaactttttaaaatgagagtttgatcctggctcaggacgaacgctggcggcgtgcctaatacatgcaagtcgagcgagcgaaactaacagatttacttcggtaatgacgttaggaaagcgagcggcggatgggtgagtaacacgtggggaacctgccccatagtctgggataccacttggaaacaggtgctaataccggataagaaagcagatcgcatgatcagcttttaaaaggcggcgtaagctgtcgctatgggatggccccgcggtgcattagctagttggtaaggtaaaggcttaccaaggcgatgatgcatagccgagttgagagactgatcggccacattgggactgagacacggcccaaactcctacgggaggcagcagtagggaatcttccacaatggacgcaagtctgatggagcaacgccgcgtgagtgaagaaggttttcggatcgtaaagctctgttgttggtgaagaaggatagaggtagtaactggcctttatttgacggtaatcaaccagaaagtcacggctaactacgtgccagcagccgcggtaatacgtaggtggcaagcgttgtccggatttattgggcgtaaagcgagcgcaggcggaagaataagtctgatgtgaaagccctcggcttaaccgaggaactgcatcggaaactgtttttcttgagtgcagaagaggagagtggaactccatgtgtagcggtggaatgcgtagatatatggaagaacaccagtggcgaaggcggctctctggtctgcaactgacgctgaggctcgaaagcatgggtagcgaacaggattagataccctggtagtccatgccgtaaacgatgagtgctaagtgttgggaggtttccgcctctcagtgctgcagctaacgcattaagcactccgcctggggagtacgaccgcaaggttgaaactcaaaggaattgacgggggcccgcacaagcggtggagcatgtggtttaattcgaagcaacgcgaagaaccttaccaggtcttgacatctagtgccatttgtagagatacaaagttcccttcggggacgctaagacaggtggtgcatggctgtcgtcagctcgtgtcgtgagatgttgggttaagtcccgcaacgagcgcaacccttgttattagttgccagcattaagttgggcactctaatgagactgccggtgacaaaccggaggaaggtggggatgacgtcaagtcatcatgccccttatgacctgggctacacacgtgctacaatgggcagtacaacgagaagcgagcctgcgaaggcaagcgaatctctgaaagctgttctcagttcggactgcagtctgcaactcgactgcacgaagctggaatcgctagtaatcgcggatcagcacgccgcggtgaatacgttcccgggccttgtacacaccgcccgtcacaccatgggagtctgcaatgcccaaagccggtggcctaaccttcgggaaggagccgtctaaggcagggcagatgactggggtgaagtcgtaacaaggtagccgtaggagaacctgcggctggatcacctcctttctaaggaagcgaaggatatggagagcaggaatgctaagagaagtatccagagcaagcggaagcacactgagaaactttgtttagttttgagggtagtacctcaaaaagagctagtacattgaaaactgaatataatccaagcaaaaaaccgagacaatcaaagagaacagattgtagagcgaccgagaagagaattcttgagtaaggtcaagtagaaaagggcgcacggtgaatgcctaggcactaacagccgaagaaggacgtgacgaactacgaaaagcttcggggagcggtaagtacgcagtgatccggagatatccgaatgggggaacccaatgcagagatgcattattgattagtgaatagatagctaatcaaaggaagacgcagtgaactgaaacatctaagtagctgcaggaagagaaagaaagatcgatttccttagtagcggcgagcgaagaggaaagagcccaaaccaagtgatttatcatttggggttgtaggactgcgacgtggcagtgtaagagatagttgaattatctgggaaggtaagccagagagggtgagagccccgtaagcgaaatctcaagcacgcctagcagaatcctgagtaggccgggacacgaggaatcccggttgaaaccgcgaggaccatctcgcaaggctaaatactagttagtgaccgatagtgaaccagtaccgtgagggaaaggtgaaaagaaccccggaaggggagtgaaaaagaacctgaaaccgtgtgtctacaagtagtcaaagcacattaaagtgcaatggcgtgccttttgtagaatgaaccggcgagttacgttatctagcgaggttaagtcagaaaagacggagccggagcgaaagcgagtcttaatagggcgaaaagttaggtgacgtagacccgaaaccaagtgacctacccatgaccaggctgaaggtgtggtaaaacgcactggagggccgaacccacgtaagttaaaaattgcggggatgagttgtgggtagcggtgaaattccaaacgaacttggagatagctggttctctccgaaatagctttagggctagcctcgtggagaggataatggaggtagagctctgtttggactaggggcccgtcaggggttactgaatccagataaactacgaattccagatatccatacacgggagtcagactgcgagtgataagatccgtagtcgaaagggaaacagcccagatcaccagttaaggtccccaaatctatgctaagtggaaaaggatgtggagttgcgtagacaactaggacgttggctcagaagcagccatcattcaaagagtgcgtaatagctcactagtcgagtggcgctgcgccgaaaatttaccggggctaagcatagtaccgaaactgtggatgtgttttaaagagcacgtggtaggagagcgttctaagagcggagaagttgaatcgagaggatcaatggagcgcttagaagtgagaatgccggtatgagtagcgaaagataggtgagaatcctatccgccgaaagactaaggtttcctggggcaggctcgtccgcccagggtaagtcgggacctaaggcaaggccgagaggcgtagtcgatggataacaggtagagattcctgtactgtgtcaaatcgttaagagcgaaggagggacgcaggaggtgaagcacgcatcgcgatggaacgatgttcaagcaacaagtgcggttaagagtcaaatgcttctaaccagcaacacgagttgtgaagaggagtgaattaaaagtagcgaaggtgtggtaatcacactgccaagaaaagcttctagccagagatgacatacccgtaccgcaaaccgacacaggtagtcgagtggagaacactaaggtgagcgagagaactctcgttaaggaactcggcaaaatgaccccgtaacttcggaagaaggggtgctagccaagagattggttagccgcagtgaataggcccaaacaactgtttatcaaaaacacaggtctctgcaaaatcgtaagatgacgtatagaggctgacacctgcccggtgctggaaggttaagaggagagcttagcgtaagcgaaggtttgaattgaagccccagtaaacggcggccgtaactataacggtcctaaggtagcgaaattccttgtcgggtaagttccgacctgcacgaaaggtgtaatgatttgggcactgtctcaacgagagactcggtgaaattataatacccgtgaagatgcgggttacccgcgacaggacggaaagaccccatggagcttcactgtagcttgatattgagtatcttttaaacatgtacaggataggtaggagccagagaagataggacgctagtcttattggaggcaatgttgggatactacccttgtttgaaggatgctctaacctcgacctgtaagccaggccagggacagtgtcaggtgggcagtttgactggggcggtcgcctcctaaagtgtaacggaggcgctcaaaggttccctcagaatggttggaaatcattcgcagagtgtaaaggtataagggagcttgactgcgagagagacaactcgagcaggtaggaaactaggacttagtgatctggtggtaccgtatggaagggccatcactcaacggataaaagctaccctggggataacaggcttatctcccccaagagttcacatcgacggggaggtttggcacctcgatgtcggctcgtcgcatcctggggctgaagtcggtcccaagggttgggctgttcgcccattaaagcggcacgcgagctgggttcagaacgtcgtgagacagttcggtccctatccgtcgtgggcgtaggaaatttgagaggagctgtccttagtacgagaggaccgggatggacgcaccgctggtgtaccagttgttccgccaggagcatcgctgggtagctatgtgcggaagggataagcgctgaaagcatctaagtgcgaagcccccctcaagatgagatttcctttgcgtaagcagtaagacacctcagagacgatgaggtagataggctgggagtggaagtcctgtgaaggatggagcggaccagtactaatcagtcgaggacttgaccaaagcgaagcaaactggaaggttttttgcgagaaggattatgtttagttttgagtgtaaaagctcaaaagagtacggtggcgaaagcaagaaggatacacctgttcccatgccgaacacagaagttaagcttcttaacgccgaaagtagttggtgggcaactgcctgcgaggaaaggaagctgccgtgctcttttttaatattccggcttagctcagttggtagagcgcttgactgttaatcaagatgtcgtcagttcgagtctgacagccggagtactttgtatggaatgttgtccgagcggcttaaggagcatgattggaaatcatgtatacgggcttatacctgtatcgagggttcaaatccctcacattccgtaaacaaaagcccgtaagcgttgatcttacgggctttttgatatattgcggtctctaaaaggtctccgacctcccaaaaacggctaaatttcatccagaattgtaactatttgtttatccgatttttgttttaattcgtccagcatgtaagcatatgtattggctgtaatgctcatattggcgtgtcctaaacgtttacttattgaataaaggtcaacacccttaaagagtaacatagccacgtgagtatgccgtaagctatgaaagtggaaaccttttttattaatattaagctttttaaaatatttgcgcaacactttattaacggcacttgaagttggaatggttccatctttgccaataaataatctttcgtgaccgttctgttttagttgactaagaatattgagtaaatgctgatctactttaataacgcgagtagaggagcggttcttagtttctttgtcaatttcatctgaatcataatcaataattttgttattatcataattccatgattttgaaatatggatagtgcagtttttaaaatcgatgtcgtgccaagttagtactctgatctctcccgggcgcatgccagtataaattatagtcaaaagcatatatctactgatgtaagcaggggtaattccgtctaaaagcgattttttgagctgttgaacttggctgaaatttagataatctatttttctactgcgttcattattccaagtcaaattaattctttcggtaaaattaattcttattagtccctcgcttatagcgtctttaacgctagttcgaatacttccattagtcttatataccgtaccttttacgtgcgtttttccatacttattcataaaatcttgatatttgtgtctagtaatttttgaaattttagttttgccaaaatactcagacaaattataataaataactttatatctattcttagtggcgtttgaagtgccaggcgttttataggtctcataccagtccttaaagtattcagcaaaaattggatcttgattagatatttgattgtcgtcttttgcaacttccatctcattagcccattttctggcagctgttttggtcaaaaaaccttgcttgcttttaaatctacgctttccgtgaacatcgtaccaggaaactttagcgcgccaagtgttgccccttttttgtaagtaagccataatttaatcatctccttattaataaagcccgtttactcaattgagtaggcgggctatttttattctccttctttgtttccatcagtatcccaaattccgtatccatttccatcagtatcaaaaaatacaatatctgctttagatatattgccaggatacggcgctaaacgattgtaagcatcgctaatatcgtcaacaatggatttttgaattaaagttcgttcatctttagtgtcctgcttaataaaactttttgtgaaagtaacttcgatatgccccgatcccatgacattaatgctatcaatagtatcgccaccatatttttcagaatctaaagagctcaattgtttctttaaagtagtaagatgttctttttgaacttgtttgcgcagggatttattgctaggtactccagttttttttgatgatttagaactgctactagattttttagaattaaattctttatcttgctttttagctattttatccattttcttttcaaattccttttcggattttgacttcctcttagttttatgggacgtaggctttgattcggttgtttgagctttaggttcggttagcccacttacaactgccatacaaaagaaaatagcaatagaggaaatgattgtgatggttccatagttagaatctttaatatttaatttctttgctcggctgtgccgatatattgcaaaaacaattggtaatataaaagataaaaatattaataatacgtgcatttaaatactcctattcttcaaatctatacctatttaattcttcctgaacctgtaaataatcttgtgtcccaatacttttagcgatgtttagccagttagcatcttgaatttcatttcctaatgcaaaatactgcttaactttttcgtgaatcatgaaaacatttgctccgtgttcactgcaagaatgagcaccatcatccgtttgatagtcgcctaaaacatcgccgtcatttttagcatgtccgatttcatgaagaataacgttttctacttcgttgtcatcaagcttagagttaactactaccacatcaggcttgccatctttgccatgaactattaaaccagggcaatgtaaaggggcaaatgcaagctttaatttatattttttgagtaatttactaacattggtatccataaataaacaccttatttttcgctgtaaatccttttcaatatacctctaaccaattctctgtcatgttcgtctaatggtttgccatcaaaagaacgtgcatcatctaacatgtcatctaagtcaccgtttacgtctttatcacttgatactggattatcaactttaccagctaagtaatccacactagtatcaagtattttggccagtttaactaaagtgtccatgtctgggtcgttatagccgtactcccaattagcatatctagggaggctaactccaatcatgttagccatttgtgttttgctgtaattgtgcttttccctaagatttgatagacgttcattaaacttcattttgctacctccttatttaacctacatatttattttagcttgaatacagtaaatatgtagaaaaataaagaattcctttacaaaagtatttacattatataaattctgtagtaatataaaacatgtaaagagttacagaaaaactttataaaggagatgagcgaatgacacaggttactgttgccaatgctaatgaaattttaaagcaatatttaaagtctcacggtattacacaaaagtttgtagccgataagatgggggttaatcgacaaacctttaacgcttacgttaatgggctaatcaagtttgatgccgattttgcgttaggggtttcagaagttctcggtatttctccttcgatttttttaaaagaaaaatacagaaaatctgtatgaagaggtgagctaaatggaccaattaattaatacttcaattttaaagaatttggttaagcagattgttaatgaatcaatcaaagacaatcaagacgacttaacgggtaaaacttggagcattgatgaatttagaaaaatctgttgtcaaggcaagggcaagagctgggttagaacctttatctttgatgaatacccggaagttaatgctaaatgcggtggcttcgtagtaaacccacgtaagacagcagaaggaagcagaacaatcatctttgcaaaagaagcttgtgagtggatgcagaagcaccaacatgaaattgattggaatgcaaaagtcccagtttaggaggttaaaaatgacagtaattacaaataagaaggtttacgaaatcgtcaaagaatttggcgtgtttgacgaaaacccggatcaattcaacattaccagcgatgaagattatagattttacctctggctagataacggttcactagtagcatttgaacctggctataaaggcttgcaagacttgctaagtgaagtgatggttaggttctttgaaaaccgtaagaagtcggaaaagacaacagaactagtaaatgaagccagaagattagtgattgattactgtattgaaaacggcaagcaagttcaaaaggagaaagcaaaatgagcaaagaagaatacgaaagagagtacggcagaactaagttagatcacgttttaagtcatatgactaaagcgtttgggaagttcctagaattcttagcaattctatttttaccatttgcaatcgttgaacaggtttgcatttaccgcacatcgcaccccgaccaaatcatttccctgctgttagttctattaattctctttacggctttaggcgtacgtgccgtaaagaagcttagaaagtaggtgagcatatgaataattcagcaattttcaaagttcgttataaagcgaacaagaaagaacaagaacttaacacaagagcaattagcggaagccgtagggcttggagttagaactattgggcggtatgagcaaggctctagttttcctaacaagcgagtacttcatgaacttgagaaagttttaaaagttaagactgactggttatcagcaacgaattaaggagactaaaaagtgagacaagacggttatgacattttgcaaaaagcagttaaggaaattattcaaaacgaaaattcgtttgcaattcttcaaatccctcaggatacccttcgggtaccacagccggcaataaatgcggttgttggcgtacaaaccgaaacagcaactatggcgtcgctacctcaacaaatgattctagcgattcaattttacgagcgggtaaagaaagaagcagatgaaaacgggctatcgacggattttaaagctcttaaaaaaatgattaaagagcagttggaggactaatgaagttatggaatcaacttataaacgaactttttcaagtggacaaaagaatcaacttacagacttccaacgcagtgttcttgctaatagtaatgctattagcgttgctagtggggatttcgctagattgaccaaagaagttaagaagtttcttggtctggcaaagcaaaaagccctctactgctagagacagtaaagggcattaaacaaagaaaaaaatatttcaataaggagattataccacaatggaaacgttaaatgcagaacaagtaaaagaagcaaagtacttgtacgaaaatcaagcactaaaagatctatcgctagaagagccagacgcaattcttttctgggacggtgaagaacaggcattaattactaaaaatgctgatgacttttacaacgcttatgaaaagccaatggatttcttcatgaaaaaggtaaaccaagactataaaggcgacttgaacgagcttgcaaggtttctaggatatgagctaagtaaagcaagcttttcaatgggtgatttcttagccgattggtacgacctaaatgaagatacgctaagaggcttgatcattgactactttgacggcgaagaactaggagatatttacgatgactaacaacgaactaatccaatttgacggtattgagtacccggtaagctataagccagctgaaattatttttccaaaatatgaagagatgaaaggcaacatcttaaaggttcatgatgaattcgctgattggacagtaacgccgcaaaaccttaagtcttcaaaagaagtaagaaagaatctcaacaagcttaaaagaactattaattcacaaagaatctcgattactagtggaattcaaaagccagcaaagatgtttaaagcaaacattgatgatttgatagcgattattgacgaaacaactaaaaatatcgatttacagcttaaacagtacgatgacaaattaagacaagataagcatgaccaacacgttaaatttattaaccaagcttgtaaagacgctggcgtagaccctagcaagattagatataacgcaagttgggataacaaaacttatagtaaccctaaatttgaagctgaactgtacgagcaagttgatattctacgtaaaaataaacaacaacttgaaacgaacaagcgaatcatcattaaaaaagccgatgaattaggaatcccgtttgcccattactttgaacagttacaaagagaggtcccactcgatgagattctcaacgacatgcaagcagaaaaagatgaactgattgaaattgctaaaaagcaaaaagaaacaaaaaagaaagagcaagctgacctagttaagcatggggacaaggcaattgacccacaaacaggtgaagttaaggaaaaaacttacacttttaggcttgaatttcaaaacgttactaaatatcaggttgatcaattaaacagtttcttaaaagactggggaatcaaagcaaggagaattaaataatgactacaaaaaaacaaggttttgatgattttattgagccaaatccagaattaattaaaagttttgacatcaaaaagtacaaaaaaacagacaatgagccaaaattaaagattcttacttatactgatgaacaacaaaatcgaaaagataaagcttcatgggctatgcatctggcaatggtcaagatggctattgcgcagccaaaaaagacacacggagttgaagttcgaggaaccactccaaatggcaagccttatcactacacttacaaatatgctgatttagctgatgttgacaagtcaattatggatgctattaaaatcactaagcaagatgatgggccgttattgacttactacttcgatattgacaacggtgctgagggcgtaaccgttgaaactgtaattgttgatgcggcaacgggttacagtgtacgaactaataaagtatggtttaaaaacgttaatgttggtaacgcacaagcaacagcaagcctgatcagttatggcaaaagatattcactttcagccgcatttggtattgcaagcgaagatgacgatgatacacaagttcaaaaaatgaatcaagcgcaagtggttgatgaaagtgctataaaaatcatttttgaggattatgtcaataatcactctatcaaggctaagaactggattaagggtaagcatgacaaggctacaggtgactatatcaagcagttactgggggattacgaactaaagcatcatcttgacaagacaaagcaaaaagcaattgaccgccgaaaagaaaaagaccagcaagttaaagaagcggtcaaaaagataaagaaacctaaatcagaagacgaggtaatcaaggacattgtagataagcctaaagtagataaacctaaaaaagatccattttctgataaaaaagaagacgcttcaatgagtgacaagcaacaaagcttatttgatgacattctaggtgattagcatgaccgctaaaaaaagaaaaacaagcgaaaacaatcgcaagttcgaaggcgtttgggttcccgctgagtattggcttgatgaaaatttaacgattatggaagtcgtcctaattactgaaatcgatagtttagacggtgaaaatggttgctttgcaagtaataaacattttgcggattttcttggagtaacctcggggcgagcgtcccaattgattacagacttaaaagaaaaaggatacatccaagctacttatacgactaacaataatgctactcaacgaattattaaggtagttaataaattaaatacccccgttaaaaaattaaataggggtattaaaaatactaaaggggtatttagaaaatgcgtaactagtaatacatctagtaatacatctaatagtaatacagatagtaattcttcttctggacgaagagaagaagacccagaacgtgaacaaatttataaacaattttttcaactggcaaggatgcacgacaagatcaaaggaaaagctactactccatcttttgatgaaattaagcaattaagaagcttactttaccgaattaacattgacactctaaacgccgttgtcagcaagtttgacatgaaaatgcaatggaacatggttaatgatccattcgcctacctgctaaaaatgcttcgtgatgggttagcaattgacaaggattctgaaagttggggtaagtgatgaacaggctaaaagaattaaggaaaaagcatagcttaacgctgagggaactgggcaaaaaagtaggaatgctaaatagcactttttgcggcattagcaaagaagagttaaaggataggctgtaaaaaatgatttttgatttaaaaattggttgcgtagtaactccacgccaattatctgatgtcttccaatacgcttttatgagatggaagcttggtgttgactacattcccaatagtcgcctttatgcgattgatacgtggaataacggaaaaatccaagttacgggtgatcggaaaatcgtttacttaggattagggacgtggaaagtgaagtagtatgagcaaattaaatagagagccgaagtgtgaattattcaacgataactttgaaaattttaagcggtatggattgccaaaagcgcaattaattattgctgatattccctataacattggtgctaatgcttatggcagtaaccccgtttggtacaaaggcggtgataacaaaaacggtgaaagcgataaggcaaaagccagtttctttaaccgagatggctatttcaacgtcatcaatttcatggattttgctagaaaaatgatgattaaagagccaaaaaagccgggtttagcgccggcaatgattgtgttttgtgcatggcaacaaataccgatgctaatagctgagggcaaaaaggaagggttaaagcacgctttcccaattacttttaataagcctactagtgcgcaagtattaaaagctaacatgcgaattgttggagctactgaatacgcgcttgtcttttatcgtgacaaactgcctaaatttagaaacaacgggcatatgatacttgatcacttcccgtgggtaacggacaactcttatcctaaattgcatcctacacagaagcccgtgccggtattgcaaagattaattgaaatttttacagatccgggagatgtggtaattgatccaacagcggggagtggaagcacattaagagctgctgttgagttagggcgtgacgcctatggctttgaagttgaacgtgatatttacaacaaggccaaaaaatacatgcttagcagttaccagacaagcttagatttatttgcaagataaaaaaagggactaagaacaatgacaaaaagagattacaaagaaaagaacgttcaggaaatgaacatggaagatttgattaaaacggtaagcgatgacttaagccactacgataagcttaaaacgcttgagggcgtaaaaaaagaaatgtcggtcggtttgtttagcaacaacttatctgaaagagggctaaaggcttatatcagattgctagagcttgaattgcggttagcaactacaagggaaccgatctttcatgattcacgtggttttggcgattacctagccggcaaatatgcggaacctgatcacgaagaaatgcatttgatcagtttaagcaaccaaggacaaatcatttctgatgatttagtgggttcaggaacggtagagaattcagctatttcagtgcccctaatcgttaaaaccttatgccttaatggggccgctaacttcattgtggtacataatcatccaagcggttcaatgaagccctcaaaagctgatttaaagatgactgattcaattaaaaatttgtctgagctaattaaagtacgcatgttagaccattttatcgttggtaatggaaattacttttcatttgctgagcatggtttactaggagattaacatgaaattttatctaacaagtcaaaagtacgcaaacagcaaccctaatttaactgcttatgaaattgaccagattagtaaagcctacttagggaagcttagtaacgtttgcacagttgaggtttggctaccgtctaacggcaacgttaatttttatggtgcttacggaagtgtaaagcaaatggtcaaggctatggaggctatttcaggcttttcatggaatttgaggcaactaaaggagcaataaaaaaatgactagtgaatcagtaacttacttaaaaaatatcttagctgtccaaaatattagcggtcttattacttctgagggctatgacttaatcgatcaagaaaagttagtaactaatcacaatcaggctaagattttagctcgattggttaaagaggtaggtactaataattacaacgccggttacgctgaggggagagctgaacaagcgtttgaagacggtaaaaaaatggctgagtttatgaaaggagcgtcacaaggtgaatgacttagtaatcatgaaaagtcagaaggctttgacaactagcttgaaagtagctgctacttttagtaaagagcataaaaatgtgcttcaaagtattagaaatctcactgctgaaaattcagcagtgaaaaagatgtttgctgaaagcacttatgttaatgatcgggggcaagaacagccaatgtactacatgaaccgtgacgggttcaccttgcttgcaatgggtttcactggtagggatgcaatgaagttcaaacttgagtacattgaagcttttaaccgcatggacgaattaatcagaaatgaaaataacttaccacaaacaccagaggaacaattgcaactcacaatggttgttactaatcgattagttaaacgtgttggcaaggttgaagctcgtgttgagcatattgagaaaacaagtgaattaagtgaagttcaacgctatcagctgctacaagcaagaaaaaagagagtaattgaagctgttggtggtgcagacagcaattattacaaagaaaccaaggctagaaaagtatttaatgcgtttggtaaagacttcaaaaaagagtttcaaattccacgttatgacagcttggaaaaacaatattttgaaaaggctatggaatttacacgtaattggtaccctgattttgtccttcaacgtgaaattcaaaattccaacgcacaaactagcttaaaaatttgattggtggtgaattgatgctagatatcggagtaggagaaacaatcacagatggctttaaaacttatgtgatgggacatgacttaaatttgcattttgttagctatggcaatcatgcaacccaccatgtaagcgaagaagttttaaaaattgttttgaaatcacaggagtaagaatgcaacgagttagaagagtaagacggggaccaggtcccgaacacagaattcaaaatgcaatcatctccacattaaactggcggcgttgtgctgtcattagactaaacgctggtgctattccaaccaagaatggcggtctgttcaggggcgttaagcccggtacgccagatttaatcggctatcgtcttaaagatcaaaaggttttcttcattgaagttaaggcaccaaaaggtagaatcagccaagctcaacagctgtatcatctcgatttaatgcacaagcatgtaattcatggtatagctagatcggttgaggacgctgtaaagatagtcaatgaaggcttagtcggctacggctatccagattacaaaggggcttagcgatgaagataaaagaagaaataaaaggcttttttgagtttttgtcgctgttgctcggcagcgcgttaatagcttttgtgtttattgtcgttggagcagctgggtttaaattactttttatatatttgcgttggctgtttggactttaaaggtgaaaattatgtattttcaattaattatgatagtggttgctgtttacatatgtgggttgacgttattcaccctttatcaagttctggcagataagagaaaaacttggggtttgaggcttgctcaatcattttgctttgtttgtttaggaaccgtcactgtgctttttgtgctgtggatgcctcatgtacacgatattattgccgtccttttagcaatttcatttataattgttccggtttcacttgtttggacagtagaggttttcgcagattgataagcaaatggcatatttaaaaatctaagatgcatgcaaggctaaaaacatcactctaaaggatttatcacgattgagtggaattagtgagagatctttagaatggtacgtcaagcaacaacgggagccgtctcttagtcgagtagaaaagttagcaaaagtattagaagtttcaccagcgtggctggtttcatgggagtgaagattgtgagtttagtaggtctgaattttgataaagaaaaaacaattagcaaggcaaagaattttcttgaaaatgattttccagacattatgaattattcaggtctgccggtaacttacttatctagtccacttctcgaccctacgggtgttcacggcggcggtaatgtaaaccatcagcccgatcaatttttaaaagctatcgagcaacaagacaagtacgatgcaattgttaaggactgtgaaaatgctacccgtgctgtggttgaagctatgagcagttgtcctgataccgaacgggatccgtaccgcaaaattttggttagaagatacgttaaaaacgattttgcacaatggatttataacgatatgaattattctccaagaacgtacggacgtaaaagggacgaagcactttatatattcgctcaacacctagagcggtaccgcaagaagtacaatgctgaaaggctaattcccgtgttgatggtgcatggatgacctatttttgaccaataaacgccaatttttgaccgataaatgaccaacttttgaccaataaacgccaatttttgaccgataaacgccaatttttgacgcatttttgaccaacacttgaccattaaagcgggttatattagtagagtcgaaagattaggaaagagatctgatctttcgatgttgctcgttaatttaacttgttagtcaattattacgagtcattaataaactcttgtttttactataaatatgggttgtgcaaaaggtgcaaccctatctcctacaagcctagtgtaacggcaacacgccagtctccaaaactggttatgaaggttcgaatccttcggcttgtgtagtctgcgaagacgtgtaaatccaccgagcggtctgagcttattaaacattgttctagtcctgataagctcgaaggcaagtttgaagaggcttgccttttatgggcagataggtagtctgctcaccgttaagttgatacttgttattaatttagattcctcccagaatttaggtgagtagcataggttcaatacctgtggtgcccgttgagtaatctggtgcgtaaaataagcaacttatttcacaacacattcaattgaattggttacgaagtgcacccgtgttggttcgaatccaacattactcgttgtagtcagcgatgatgggctactagaatcccaaaaattcaggatcacgttaattgcagtagctgctaagctattgctttttgtttttagggggggaaattatgaacaaaattttaacttttgccgctggtgtggttatcggtgtagtttacaaggacaccattttacaagtagcaaagcaagtagaagccgcaaaggatgctaagtttgataagaaacttgaagacaagctggcaaagcactttaaagatgtaggcgaacaagccaaggaagaactagataagaaagttcctggtgcgtttgacccaagtaatctggatggcctgtactaatgacacctacacggtactttgagttatgtcaaagacatagccgtttagttaaggcaagaaaaattgttaagtactgcaaaattaatacagttgctaacatcaagcagaagattctatttaagcaagaaacgggctttatgccgcaagattacttagatagatttggtaagaaaagttaggaaatgaaaaataacgaagaagcacctatgacagattcactttttattagaattgctaaagggaaaattgcagattaccttttagaagttggattaaatgctgatctttcaaaaagtgaattaatggcaaaaatccggatgacttggtacagctatatagctcgtaattataaggctatgttttgtatccacggctttaagggcaaagatgaagcaaaactttctaatcgctattttgaagtaacttatattactaaagatgatgagtttgtagctgatgaatatttgcagtttgttccaacaacggtaaaggaagtttaagggaatgcaaaaatgaatagaaagaaagtaacttacgtggtaactaaagataagaacggtaaggttattagtattaaatctgttcctgttccatcattattagatagagtgcaacgctcgtgtgaagaacgtttctcatcgtttttgttagcagttattgttgtgttcatatgtttaatgacgattatgttagtgcttaaaagtttaggaggctaaatcatgcaagtagaagctaaatcaattgatgaaattaagccctatgaaaataacccacgtgacaacgatgacgcggttgacgctgtagcaaattcaattaaagaatttggctggcaacagcctatcgttgtggacaatgagggagtaattatagcaggccacacacgcttacgttgaaaagaaaattgctgaaaaattaggcttggttagtgtaagcacaaggtctaataatatcggtgggaaagaatactccactaaaatgtttttagtagacagggatgtttacgaaaaggctggttacaatcacggtaaaaagcttaatattaacggcaagttagttcaagataagtatgtattttcattttaaggggtattaaaaatgtttgatgaaaaagaattcgatttattgcaaaaggtttgtggattaggtacaaaaggcttagaactatccgaacaaagtttaaagaagcaaattgatttagttggtgatgatcttaaaagatcagctaataaaagctatcttagttctgacgatttagaaaacgctgctagaagattaaatgatttagcttcgcagattaagcaattaaagttaatgcaaaaccaagcagggaactttgaagcttataagaagcaacagcttaaaaaaataagaaagaaaaaagaattgacaaattaagaaagttgtttattgaactggttagtaaatcagttcttttattttgcctaaaaaggtggtgatttcagtttggcaaaagctacaaaagataagggtggtagacccgaagtaataacagaacaaaaattaaatcagtttcaaacgtttattattgctggctgtagtcttaaagaagcttgtgaacaaattgaaatctctacaaatacgtggcgtcgatatatgaagagacatccaagttatgtcgctaagtttgctaggtggaaaaaggaacttgaagcacgggcaaaattgaatattgccatgaagatcactaacgaaaaagataccgaagcaagtgtttattaccttgaacgacagactaagttaagagatcaagcggcaagaaccagtttaaatcgtgctaaagcccaacaaactcgtttgcaaaacaagttgttaaagaaacaacttgaacagattgataccactgcaagtaaggcaagagatagcatgagcaagttagacatggataccttaaagcgtttagcaaatttagaccaaggagttgatatcagtggaattgactaatgaacaaaggcaaggtatagcgttagcggctagggaagaactagcacgcagaagctacgcctattattttttattggctaattctgatattaacgccaagctttatgattacatcgagtatatttgtggcaagcttcaagaaataattgatggtaagcagaaacatttgatactggaacttccaccacaacacggaaaaagtatgtgtgtgactgagactttcgccagctattacctgatgaaataccctgaaaatcaggtaatggtaacgtcatatggtgaagatatgtatactcgttttgcctgcaaagaaagacagcatttcactgattgggctaaccgattattcggcttgaccatcggcaaaaatagttccaatgattttaccgttgcagggcaccgtggtgaagcgtattttacttcaattcaaggtggtggtactggtcgaccagcggacttgttgattattgacgaccctatcaaagacgcaaaagaagcacaatcgcctacagtaagggaaaatatttggcaagaatggacttcaacattttcaacccgtctatctgctaacgcttctattatcgtaattatgactaggtggagtaccgacgatttagctggcagactgctagacaaaatggactttgactgggaagaaattaagtttcctgctattgcttatgatttaccaagtggtcaaaccgatgctataggcagacgtaatggtgaagccttaaacccagaaaagcatccaattaagcagctgctaacccagaagagtaatttaggtactcaaaaatttaatgctatgtaccagcaggcaccaacggtgcaggagggtaacattattaagcgtgagtggattaagttctatgttcctgatcgtgagacgatggcgcggcttcacttaactgaaaaagaagtcaaaattttgccacgacacttgcagcaaaccattcaagcatgggatgcaacctttaaatctaaagaaaatgacgactatgtggcaggtcaaacatggtcaagacgtgatgcggaggtgtttctgcgtcctggttggtgccacaagcggttaagctttacacaaacgctggaagctattaagtaccagtcaacactttacccagaatcaacatcgaaattagttgaagacaaggcaaacggtcccgcaattcttgatactttgaaaaagaaaatacctggaattatgccagtatcgccaggggcggacagcaaagaagcccgttttgcttctgtttcaccgtacttcgaagcgggacaggtatatataccgcaccctaaatggaaacccgaatcagaagaattgattgaagaatggtgtgggtttcctaacatgccgcatgatgaccaagtagactcagccacttatgcgattaagtacctaatgaaaaataaacggaaaatatcacttggatttatttagaaaggaggtcattaattgtttggatttggcaaaaagaaaaagccagcacaaattacaatcggtgctgactttatggattacgaaagtaaaggcgtaacacccagcagattcggtgatacgtcttcttttatttcaacaaggtatttagatagaaaatacaactataaacaagctgaccatctgtttaagtctaatgctttagctaaccgaatcgcccgtttaccagctgaaacagcaactcgaaacggctggcggatagtgattaacaacaacgatgaaaagcaagtagtctatcaagcggctttagatgcattattgcctaaagaaaagattgctagtgaaattatttatagaaatatcattggagatgcatatttaaacgttaatgttgatgaaaaacaccgaactagcttagaacagccattagacccgcacaacattttaaaagtaaattcaatcaatgcttttagtcaaatgcatgtcaaagctaaccagatttgtaacgacccaacgctagaaaactttggcaaagaagaaaagctggtacttgagggcctatctgatggctcagatgataattcaaaagagcctgaaagtatcacaattgacagtagccgctatagacacatttcgctggacaagatggaagacgatgcaacgggtacatctttgctaatgcggtgctatgaccagattaaaactcttgataccggtttgtactcaacaggcaaaatgctttacgagtacaacatgaaagtctggaaaagcgatgcttattttgatctgtctgaggatgaccagcgcaaaactgatcacagaatgagccgcggcatgggtaccgagtcactggtagttgttgggaaagacgatgacctggaaaaagtttcaaataagccgggcggtattgattcactatttagttttgcttggcaacaacttagtaccgcaactgggattcctaaatcgattttgatgggtgaacaggccggtacattggctggcgcttcacaggacgtagtaaattactacgatagtatcagggctattcaagagcagacaattaagccgcaacttgagtggctggttaagttgctgatgtggtccgaaaatgtgggcggcggttcagaagatcctgactcactagattggcacatcgagttctactctttgcagacactcaccgatagtgaaaagattgataaccttggtaagctttccacagcgttgtccacagcaattaatggtggctttcttactactgatgaagcccatgatattttacttcaacaaactactaacgaagcaattccaattcagttaactggcgatagtgccgatgatgacattaccgaacaagatagaaagtcttttgccaaagaaaaggctaagatagaaaaacacctcacgggagcaaaaaaccatggcaaggagacgtaaaacaatcccaaagacaagataccccatgaacttggaaaaatcgtatctgggggctttaaagcgtcttgtcttgtcatggaaaaagaaagcgcaatggtatgcagaatattatttgaagaattacatgttaggcggagcgttgtcgattgattcagatgatgatgaaaatgaccctcacaaaatagagcggttgtccgctttgattgcgttgatgatattggctataaagaattctaatagtaaacaggaacttgaaaatgttgcaactcaatttgtactgtcagtaaatagtttttcttatagcaatgtcaatgcgcaagctagggcaatttcatcacaagcaattaaaagcaatccgactattcaagcgtttatcaaggcaaagattaaggaaaacacctcgtacatcacttcaatgcgggataagtacgtcgcccaattgcaaagcgacatttaccgcgcaattagtgatggtaagggtgccacggaattaaccaacgcaattgttaagcgtacgaatatgtcatataaccatgctcggctaattgctaacgatcaaacaggcagtattttagccgagttgaataaataccgcgccacacatgcgggctttgaaaaatatctatggcaatccatggaggatggacgggttagacctaaacaccaaatactagatcaacaagtttttagatacgatgatccagatggcggtgacgatggacagcttccaggtgagccgattaattgccgttgtgttgcgatgccagtaatagatgattagcactcatgaagggtgctttttttatgcagaaaggagccagaaatatggcagataatacaccaacaagtacaccagcaggtagtacaagcaagcccttaacgggttcacttttaaatagtgctaccaagccggttattgataagccaaccagttcaccggttatgaagccggttgaaccagcaaaggaccctaaaggaatgtttgattggtctgacgctaagccttacgtgattggtaaagatgaaagtttgtttgatgtcgctcaaaagttctctgtagctttacagcaacttagatacttcaaccacatcaacaaagcaacgatgaaggttaaagaaggtcaaacaatttacattcctaacaaaccggttgaagttccttacggtgcatagcttatgggcgcaattaggtatgaaactactacgccaatcgataaatttactatcgatccaataacggggtttctgcacgtcaagaatgtgccaatcacatgtgagggcgtacgaccataccgtcaattcgatgggcaacgaattcaagaagctaagacaccagaggaattgttctcagctgctacggttgattcagccaataacaaaccagttactgacgaccacccaaccgacgcaaacggcaacacaatcatggttaactgtgataattcccagcgatttatgaagggctttatgtccgatcatgcccgtgttgataaagcaaccaagactatcagaaatgatttgaccataactgatagtgacttaatcaacaaaatcaggcacggcaagcaagaattatcaattggttttcaaatgcagcttgatccaactaaaggtgaacttaatgggcaagcctacgatgctaagcaaaccaatatcagaattaatcatgttgcgattgtagaccgtggtcgcgctggtcactcggtaaggctaacggctgatagtgcagaagaaattcctgaagataacgaaaaaaagaaaggtgaaaagatggactttacaaaagtacataccaagcaaggtgatattagcgttgctgttgaagatgccgacaagttaacgaagcttgttggtgacgctgacgacagcaacagcaaattagaaaagcttattgcggagcgtgacaaacttaattcccaaattaaggagttacaaggctctggcgataagaacaaaaaggaagccgccgacgctaagaagaaggctgatgaagctaactcacgcgccgacagcgcagaagaagaaaataagaaactcaagtcacaacttgcaggggatgcattcgaagacagaatcaacaagaccttagcattccgtgaaagagctaagaaagttgttggtgacagctatgactttgccggtaagagcgaacgtgaagtcgaagaagccgctcttaataaaaatttaggcgaacacgattattcagataaaagtgacgactttgtaagtggtctttatgaaggcctatttagtactaatgctggtggcgtaagttatggccgtactgctggcgattcgaacgaaaagactgccgtagagaaagcacttgaagcacgtcaaaacttatacgaaggaggtaacgaataatgccattaccagttggacaactttatcaaaagaaagaattaggtaacggaactatcggttctttaaaagattattcaatttataccgttaccgctgctactaatatcgattatggtgttgcccttgatattcaagacaatcaagccgtagtagcaactaaggcacctatctatgcaatttcggttaagcgcgcttacgtaattggtcatagttacgatgacatcgaaaatgaccactggcttaaaggtgaaaagattggcgctttacgccgtggtagcgtgtcagttccaattactgaagacgttgaccgcttagatcaagcaactattaatgctgatggtacttttagaccagctaagccaggtgagcccgttgttggtcgctttatcactgcaggcgatgctaatggtaccgcaatcgtagatgtcaacttaactgacatgggtactactggcacaggcgccacggtagacaagccatcaacaccaacaactgatccaagtactactaatcaatcagccggcacatcatcaactaccggtaccgataagaagggggataaataatgccaaaagcaggatttaatacgggaactgcctatagtgaacttttcaacgttgttgatccggttgttttacaaccaaaacgagaagaacttcaaggcagaacaatgttccagctaaaaccgcttcccgatccatgggcacttacttacgaatgggcatggaaagaaattatgggccaagcatcagactacaccgaccgtgcaacagacatcactaccactgatgtaacttaccacagggaagtaggctatgttgcagagaaggcagctggattcgaatattcacaagctgatttagagcgttcacacaccggcggtagaaatatcgatattattaccgaccgtgcaactgctacccatgacgcattagcaaactgggaagacgctttaattttcaacggtaacggcgattcacaaagacctatctacggtttaactactgatgctgagaccgcaggttatcaaactttagatgatccaagcgtaaccttgcaaaaggtagtagaccctaacaacaaggacgcatttagtgatgcttacaagattatcaattacttcatggatgccgcttcaaagattactttgttgcctggctaccacaacgttaagccttacttagctttgccaccaaaggagtacgaattattaacccgtccgttggttaaccaatacaatccagacaagactttatggaacatgatccaacgtaacggagctaacagcgatggtgtttttgctggaattaaaccagttaccgagcttgaagcaaagtattggaacgacaaaaagggacaagcaggtaaaaagaatatgggtattgtttaccttgatactcctgatgttgcacaaattgttattgcaatggaaccatgccgttacggcacagccattccatccgctgacaacggattaagctacaaacaaatgtacatggaacgttcaggcggcttgtcagttaagttcccagccgcaattgttcagttaaccggcttgaatgatggttctgaaacatgggcagaagctaagacaaaggctaagtagtatgaatgacacaactaccacagtagggctgattaaaaagcttgatactgcaggtatgaccgatgacgtacccgatgaatcactagaagcgttgattgaaaacgcccgaatgattgctatttctgacgggtttcctaaagtaaaaaagcttcatggtgcggaaatgccagcccttgagttggctacccgtgccatgacactacaccttttagcaacgcaagacggggcaggtagcggaatgactttcgaaaaagtcgatgttttggaaaaccactatgctgataccagccgcttgaagtggttacaacgctctccatggggacagctctattggaggctgtaccaagattatgtcggcaatcccgtaaaaattagaataatcgaacactgatgaaaattgaaggttataaccgtattccagaagtaactaaggaacttgactacttaaaaacgcatcaggttgtaattggtttttttggaaaacgtgaaagtagattactaacaatcgtgggagctaacgaattcggagccacaattaagcctaaaaatggtgaatggctatggattcctactaaggattgccctcagggaaaaggtccaaaagacattgaaggcttgtttattcctaaagggcaccgtgtagcgtgcgtgaacgaccacggtaagttagtagcatatttctatcttagtaaacttgtacaaataccagcccgtccgtttattcggcaggcttatttagctaacaaaagaaaatatacgcaattagtaagacaatacattgccgacattctagcaggggtggcgactggcaaacagttgctaaatcgtttaggtgttgcatgtactgccgatattgctatgtcatcaattaagttgaagcacccaacaaaccgaccagcgactatcgagcgtaaaggctcagataacccgttggttgatacaggggagcttcaaagacaggtgaagtttatgatagttccaatttagaaaagggggttgatctaatgcacaaaatgaatccagcaagaatgattcacaagtacggtgtagacattaaagtttggagttcggggcaattctataaaccccgctatcctggcacgtcaactgatgaccctgattattcccaattaagcgatgatgatgctgaaaagcttcatgagccagttttaccaatgtcaagtcaccttgctcaactcttcgcccagttagacggcggcggagaagtgcaaggcgatttactttggttatcaattaataaatatccaattgaaagtgtggtcaatgttccgacacaaggcggctactacaaagttactagtcgatcatcttatgaaggttatacgaatccacacttttttgagtaccaattgaagggagtaaatcaggatgacacaaacccaaatgccaccaatgatggacaactacctagtgatataccaacttatccaggtagttaatcaaaaatatcattgcggtgtatatccgcaaatgaatgccggtttgcgtagcaattacccgtttattacttatgactgggtagaccctggaagtgacgttactttagacgaaactgatgtcatggaagtaagacttcaaattgatgtgcaagcaaccgacatgtatgaagctttgaatacggccaatgatttacgcaagacattagcgcacagttacggatatagaggattttttaaacaagcacatgtgattccacataacgtatcaggaacaagctctcgaaatttctataatggcacgcaattacccgtttatagatttggtttcgattgctcgttttctatttaccgtgttggaactatctataaaccggaagaccttaattttgaattcaatgaaacaacgattgaatcaattaaggctatgaatcaaatgacaggaaaagaaataaacgtaagaaaggaagaactttaatgccaacattaaccacggtcgccccttacgaccgccctatggatgtgaacgtcattatgactgtcctacatccccaaccaattaaggggctaggtaatattttgctgttaaatgctactactgcagctgctaacggtgattcagctggcaaagacgacaagggcgcacaaaagacaccagctcaaactttgccagatactttgtcaaacaccgaccgcttgaatggtttgcttttacgtaagactgacccagctactggggcaatttaccgtgaatataagaaccttgatgcggtggcagttgactacaaagaagattcggctgtttacaaaaaggctacagcctactttgctcagccaaagcactcagaccgcttagccgtcttagattatgacaagtcaaaggcttacgatagtttgaaggctttctggtacttcaactggacttttggcgtatgtgtagacaacacaattgacgattcaaccgttcaattgtcaaacatctttgaagtaaacaaagatcacttcttagttctccaaactgaagatttgtccaagtttacccaaatgatggggcaaaactacactatcggcttgaagcacgatttgaatgagccaatggacgccgcttttgtcggtggcattgctcttaacgatgttggctcaattacttggaagtttaagcaacttgaaggcattacgcctgaaaacttaactagtcaagaattggctggtattaacaatattcatgctattgcctatgaagaaatgatgggcaaaggtcaaacctcagagggaactaccttatcaggtgaatatattgacttgcttcacggtgtgatgtgggttcaaaccgaatgtcaaagccgcttgcagaagcttttgcaagataacggcaagattccatatgaagctcaaggcattgccatgattcgtgcagtcttaacacaagttttgaatgaagcgtacgacaagggaatcatcatgactgacgacactactggtcgcccaatgttcagcgttactaccactccacgtagtcagcaatcacgccaacacttgtcagacagattctatgacggcactagctttgaataccatgcttcaagcgctattcatactattaccgttaatggcgctgtcgattcagacactatcatggctgcttaattagaaaggggagtttaaatgccttcaaagattaaaacatctaaaatgcgtgaatatgatgccaatgactgcaccattatgatcaatgacaaattgatgtatggattttcagaaaacagcatgtttacggttactgataaaactgatgcaaatacgtacaagattgatccacaaggatcagctactaaatcgcacaataacaagactatggcgggctttacattgccattagatgaaacatctccttgcaatgcctatcttttagacttgtttaacaaggatgaatttttcacagttgacatcattgacacaacatcacacatttcttgtcattatgcatcaattgacaagattccagataagcaaggcggcgcacaagctggtgaccgtaattggcctattacaatgcttaacaaggaagaaacttcgaacatgacctatagcgattaattcgaaggtttcaagagactttcatgaaatcaaattaacttaaaggagacttaataatgagtaaagaaatcaataacgcaaagcttgccgaaaaggcgcacgaagaacaaatgaagattaaggaagaagcggaatcaagtaaggtcgcgcctttgactgctctttctaagaccgtaaccattcgggaagatactgatcaagaatatcagttaaagcttcaattccctggagttgaagaagcaaccgaaattctggaagattcccgcaacccgttcggcgcaattaatcgtccggaattgctgagagaaagtttgaagcacgtgattattcaaccaaagattaagtcaattaagtggtggaacgatcatgaaggtctttatgaagccgccgaagctgttttgaattttcttactgaaaaactctagacagaaactaggtaatagagaaattgaaagacaagccgattatgttgaactccctctgcgtttgataatgcacggaattcctgaacggcttgtaaaaaatgctacgccagatcaattgctgatcatggctaaagtagtggaacgagatatagaaacaacaagtattagtcaagcaaatcatatcggtgaattgtttggcggcggtgataaatagaggtgatgcctgtcaattaaattgatgggtttttattttgcctgaattttaaagaaagtagctgaaaacgtggctgatatagagcatttagggattggaattaatacaaacgttgaatataactctctaaaagaagctgaaaaaacaactagaaagtttatttctgacctcggttttttagaaaaacgctttgatcgtttaaaggctcctgactttactgaacaattcaacagaaacaaaaattccgttgaggagacaagtcgtacagttgctggcttaaaaaagcaacttggtggtatggctaccgaaagtggtcaaacaacagctaccgttaaaaagcatttagaagaaacaaagaattcaactaatcggctaattgatgcaaatgtaaaattaaagtcttcgattgctggcgtcggtggttccgctaaaactatgggcggtttatctaacaccatttggaaggctggcgtttctgcaaacaccgcttcaggtggcttcaatacggcaaaagatgctgttgagaagacaaatgggacgctaaaaaacaacagatcagccagcgaccgtgcaactacgggctttaatttgcttcatgatgcgggttcaaaattaattaccgttggaacaggcattgcggcggcaatggtcccagttgcggcggcttttaagaatgcaaatgatgaagccactaagctagctgatgaatacaacgtaattaagaacttgcagcaaactggtggagatagtgccgctactgctaaaaagaatacggcggctattcaaagggaaaaccgcaatctatctttaaagtacggcgtcgatcagaattcacttgctcaaggttcggaagaattaattaggcgtggttattctggtaatcaagacttagcggcgcacaagtactttgtccaagcggcaaaagcaacaaaagaagattataactccgttgttaatgccgccgctcctatgcttgaacagttcgggtataagaagcgagccggtaacagtactaaaaagatggcacgctacacaagggaagtcttaaacaaggcggcctatgtaggtgacgtgacatctggtcaagttggcggtgaaggtggttttggtaattcctttaagatggctggttcaatcctccaccaaacaggacaatcactttcatcatcacttgcagctcttggtactttatccaacttcggtgaagaaggtacctcggctggtactggtttacgtcaaattgtttcaagtttagttggcgcttctaaaagcaaaaccaagactgcggcattaagagatttaggattatcacccgctgatttctttactaagtcgggtaatctaaagcaactacctacggtcttcaatatgcttaaccgagcaacgcaaggcaaaaagtctaatcgtgttaccggcgactttaaacaattatttggtcaaactggctttaacgacgctttaattttgactagaaataatcgtgacgttgctaataatgtgagagcggcaaacagggcagacagtacaaactacatttcaaacttgtctaataaaaatatgtcatctttgcagaatcaattatctaagacaaagatgttgctaaaagatatggggatgcagtttgcccaacaaatagccccggattagccaatatgctcaaatttgttaataaggtattaagagctattgaaggatggcctgcgcctgttaaaaagacgctgggctatattaccgcaattactggcgctttaagtactggttttgttgctaaaagattagtcggcaatgtgctggggattggcggtaagactgtagccaaaacagcggcaaaaggcgctggtgaatcagctaacccatctcttttaggtggggtgggctctgctataggtaaagtcagctccaacctaattggtggtaaactcgcaaaaaccggattaggtagcaaagtagctggcaaattaggtggtactgcaagcacaggggcaactgcccttgctgttggcggtatcgcccttaactccggtattgatctttataaagcaattaccacaaagaaccctaaaaagaagtttgaaaattacggtaaatctataggttccgcaatcggtggcggtgtcggactatatctcggtggtccagctggtgcggctattggctctactttagggcaagtagccggcaaatgggctggcgacatggctcgcagatttagtaagactaagtttggtaaatctgtcggtaaaaccttcaagcaagccgcatggtcgattaaaactacatggcatgatgctggtatgggcaaaatgattggtggcactgttaaaagtgtcaaaagatcatttggtagcatgacccgtgacattggtcgagattggcgcgatcttaaccgtaacaaagcttttaggaatttcaagaacttcttaaagtcaggattgatggcttctttaaagcttgctattaaacaaggcgcaacagtcattaaaactggtattggtgttgttcgtggggctgtaaagattgtaacgtctaacatcaagggcattgtcaaaatatcgtctggcgttgtcagaacaatatctgatattttccactggaaatggggcaaagcttggaaagatatgaagggcgttgcaaaatcagctattgacatggttactggaatgctatccggtcttaaagacatgtttagctcagttattggcggtattgcaagtagtgtcaaaaatgtttgggattttgtgtcaggtaaagactggaagacaaagaaacctgaaaatagcaccagtgttgcaagtgctaacaaatccgttaaagccatgcaaaacggacaaggtggtaaacatcacgccagcaagtcacatgctactactattgctgacattaaccgctcgactcacttaggcgctcatgctaacggtactgcttcattagttggtgaagcggggcccgaattagcttacaagccttattccaaccatgctcgtttgcttggcgctaagggtccgcaattggcaaatatccaatcgggcgaaaaaatccttaatgcacgtgataccgctaaagttatgagtggtggtctgggcgccggtttaaagcttaaaggatatgctaacggcaatactggattaggcaaatctactaagaaagtaactgccgattataagcagataacttctaagtcgtccaaatcgcttgacgagctcaccaagaagagcaattcaagttggcgtaagattacaggcactaccacaaaacaagctgagaagagcagaaaaggggcaataaacgaatataccaacatgcggactggtgtccataaacaaatggacaagatgcatgacggtgtagttgatcttgcttctacgactgcaaagggctttggtaaagaactgggtcacatgagcaagtacgcccattccgcaatgggcgatacaattgaccaggttaattctggtattaagggaattgatcaagttctcggacagtttggtggtaacacgtcagtcatcaagccagttaagttcgctaaaggttcaaatgggcgtttgtcccaaaataccatggcaatggtcaatgatgcgacaattgggccaagacaggaagcaattatcaaaaatagcggtgatatttggattccaagagggaataacaggatattgccacttgaaaaaggtgattctgtcctcaatggttctcaaacccaagaattagcaaattattggggattacagcgttttgcaaaaggctctggcgtaagtcatagcagactaagaaaaatcgctgagacagctgggaataatcctgctaagagttttgctgatatgtacacttcaaaaattaaggcaagtggtacagatttacgacaaggctctattaatttagctagaaattcatcaactaagttaggtaatccttggtctaatgcaatgtggaccgtcattaataacgcaattggcggagctaatggtaagggcggaactcgtgaagcgttcttaaaatacgctgaatcaacatttagtggtgttaaatatcaacttggcgcggcaaacaagaccttatccgactgttcaggtatggttatgcaagccttacggcattttggtgttaacatcggacgtactactgtagcaatgcaagaatcatcaggtacgcaatatttgggtaaatctttatctaagacattacctggtgaccttgtaatttttggacacggaacaggtgcagctgggcacgtcggaattatcaagaatccacgtaccggcacgatgttcaacgaaactgaaccaagggcacatgtatcaaaaatttctgatgatatgagtatgggttacggtttctaccgtgttcgaggtttgcataacgcggttaaaaaatcggccagcgcccaagcttctaagtcacttcaagcacttgcaaagcgtgagttaggctcaagggctttaaagtggattgacgacaatttagcagatactgatactagtggcttgatggctggtaaggctactggcgatcatgctcactggatgaaacaggctcatattcctgaaaaagattgggctggtattaactacatcgttagtcatgaatctggttggaaccctagagcggtaaacccatcaagtggtacttacggtttaggacaaatgcaaagctataatttgcattactacactaagcatggtggtaagagtaaccctatcgcccaacttatgggcattatggattatatccatgaccgttacggctcagttgcaaaggctgtttcattctggcaagctaaccacgcttatgcgacaggcggcgagcccgccgtaggtgataaggtcctagttggtgaacatggtccagaattagctgaattcaaagatccggttcacatctactcaaatgaaaagacgcggcaaagattaaagccactaacttcatctaagccgaaagtacgcccagtaagaggaactggcggggctttaggtgacattcaagtaaccgtgaatattaacggtgacgttgatggtgacaatgctaaattgcaaaaattagcaaaaatgattggcgctgaggtagatcaacaagtacgtcaaaaattaaatatcattcttgatcatattggcgatgatacgggtgacgatgatgatttcttatagaaatgaaggtgatgttagtggttcaagcaactaagccaaaaaagagaacagctgaacaaaaagcccatgactctatgaaatactgggacaagcggcaaaaacatgaaagcgccgtttaccgaaaaatgttttcaaaggcgcagggctatgacttcgattcacattttgaaaagaatcaaattaaaaagaaaaagcttatccgaaaacgtgataattgtttgaagcttgttgatgctgcaaacaaaaggaaaaagcaagcggaaaacaattataaaaaagcgaaagacaagtacgaccgtattgttacgcaaagaatcgatttaagtaacaaattggcggaaattgcggaacacaacaccggctggaagaatgaaggtaaatgtgctatttaccgttcggatggcaaaggtgaaattatttatatttcgccggcagacggtgaaagtgaaaatgtttcttcaaacattacttcttatccggttgatgagggcgcaccatatagctcatatgctcgtgtaaatagtaaaggcgcaacagttgcaggcatcattgttggcaaagataaagccgattcataccgtaaatggcacatgcttagtcaatggaatagttcgcatgttcggttaacctatcgaggggacttctgctataagcattacttaatcgcaaatatgaacaacgactataagaatcttcgagataacattgaagtttcacttacttttcaatttgtctatcaagcaaaaatcaccacttcaaatgatagtaagcaccacagaaagtcgtctaaggcttctaaatctgtcgcaggtaatcgaaataaaaagtacactgctatcactattaaatctggcgataccttgtgggctttgtctaagaaatacggcagttctgttcaatggatggcacgagtcaaccacattaagaatcctaacttaatctaccctggcaataaaatacgggttgcgtaggcggtgatttagatgagaaattatcttgatgttgatgttaaaaatattccttatatctttcaaataacccttgtgggcgatacctatgatatgagagtagattacaacgaagttgcggattactacacaattacaatttggcataacaataagaggcttctaacgcaggagcctcttttgcttggtcaattagttggtattgatatccctgatcccgaattgccaagaattgacattcgcacgatggacgaaacgggtaaggcaacagaccaaggcaagggaacatttggatatgaggtccgcttgtatcttgacgttgttgacccgaatggatcagaaacagaagacccatcaattaaaccgctaggttatgaccctaacgaaaatgatgacgacctaacggatgaggaagtgtcttactaatgatcgttactaaagatccacatatggaatttgtggcggttgatagtaaaggacacaagcaaatcgtatataacgatgaaacttacgaacataattatccttttacgtttgaagtcccgtttactaatgatcctgtcccgtctacttttacaacaactattttcaatttaaccaagcaacataaagacttttataaaaaagggatgcactgctggataaattttaactggggtaaagaccctaaaaaaatagctgaaggatttatctctaatacgggtaaattaagcaatgatgggacaactgatagtaaagttttaacttttactgaaggcacaaactacagcaatgtagctgctcgaaagctaaagctaaaaaagaataaaaaggttaatcactacaaaaccgttaaaatcactgaaaaaggtcattacaagaatcagcgttatagtacctcggtcgttgaaacttacaagagaggtcctaaaaaagggcagaaacatatagtccaccattgggcttatcgaaaagtatgggttaaaccaaaaactacaaataaaagggttaaaagccgtgataataagacttattttgctaaccgagtttaccgaaaaggaacgacttataagcaagtaattgaaggaatagcggaacaagccggtatcaaaatagctaaaatcgatttagctaaaaatgaaggaattaaaaaatcctttaccgctaaaggcaagccgctaactttaattaaaaactttgttaagttagcaaaatcggaaatgttttatgaacgtggcaagctcgtaattgtcaatcctaatagcaagaaaaatacttggtttgtgattgatgataaagacttaattcaagttccatcgcaaaacgatgatgataaaaacgggacaacttggcaaattgttacgcccttagtcccagaagttaccgttaataccggtattatcatgaattctaggttcttaaaaggaaaatttgtcgttaaaaatggacagcatagttttgatggcgaaagtccacaaactcaatgcactattgcggcggttacaaaagctaaggctggtcataaaacaaaatctaaaagtaaaggcaagaaaaaaggtaaatctaaaaaataaggagatgacagtatgaaacaaaaaaatagggttccaattcgatggtatgaaaacattagtaaggtgaaaaaccgattcagcagaagtcttgaatctgcttttttagctaaagttttaacttacgacaagaaaaaacacattgcagatattcaaccgctggcgaattggatcgatggcactaaatcggctcagtacttagatgttccggttgccgaatcttgctataggcttgatgaattgttagataagtttaagtcggattttaaagccgttgatagtagcccagaagttaactcacattttttagaacattatccgaaaaagaagtctatgagagttggcactgtagtgatagccgttactatggaccgtgacattgataactgggacggtacgggaaacacctttacgccaaataccagtagaatgcatgatgcaaacgactcaattatcgtttctgtttataagggtgacgacgatggctagagatttatttatgagtgataatcatgatctagtcattgatccgattactcacgatttagaaatgactagcggtcttgacgaaatagctcaaagaattaaagcaacgctagaaattcggtatggtgaaatgcaacggctagaccccgaaatgggggcagactatagcagctttttaggtaaaaacttcaataaacaagcggcggagaatgatatgcgagcggctattgaagcaaatgttccggaagttgaaaccgttgataatatcgaatttatcaagaagcctgaaagaaaaatgcagattaattttagagccaccgcaaatattggtgaagtagagggggggttacaagttgacaactgattttggtttaaaagaaacaggctatattgccccaagtttcgcagaaatcttagacggtgtggaagacgattttcgaacgcggcttggagatgacattgcgttaacaagtaatgcctatctaggtatttttgcccgtttaatgagtgatgctgcttacgatttaattcagcaacaggaacaaatttactattctggattctattcaaccgctataaattcagcattagaccgattagcgggcaatatcagtttgacccgtaaagttgacgctccatctcatgcggaagttgtgataacgaccgaaggcgagtatttaattcaggctggcgaaaagttcgaaacagaagatgacttggtgtttgatttaaccgaggatgtcatcacttcaaagcaagatgatggtacttttcaaggaactggaaacgttgaatgtgaagaaactggcgaatttactaatgtaccagctaacacaattactttgtttgccaacccagatgaagactttatctctgtaaccaacccacagcctgcaggcggcgggcaagattatgaagacgatgaaacctttagaaaacgtttaattatggaaaatgtcgcccgtcctggtcctacagaactaggtattaaatcggcattaatgaacctcaacggcgttaagcaagttggctttattgacaacgacaagtataagacggatgaatacggtaatcccgaatgttcagttcacatttatgttttaggtggtaacgatgatgaaatcgctaaaactttagttgataaatgtgcggccggtatcaccttagctggctcaattgttaaagaagcaccagatgcaacaggaaaggttaaagaagttaaatttaaccacgctcaacaacataacatttacgtaaaggtcgatgtttcaattaatgacgactggaacagtgatgcgggggttgatgacatcaagcaagctatttgcgacgaaattaattcccttgaaatggggcaaagggtcaattttacccgtctttattctgttacctatgacgttaacggtgttgatgatgcaaccattgtaattggtagtactaaagataaattagcagaccaaaatattttaattggtcgttccgaatttgctcattgtgaccctgaaaatgtggaggttgatttaattggcttatgagacaacagatcagctgatcgcggaagtagccgaccactggaacaagaaaaaagataccgttttttaccagctgctagacagttataattcactgcttgaaaagatcagtgatgaaaacgaaaaaattgcagactggcgaagcattgacaaggcaaaaggcacaacacttgatttaatcgggcaagattacaaagcttatagaattagtgatgatgatgaaacattccgtttcatcatttttttacacattttaatttctagggctcaaggcacaataccatcaatggttaaaattctgggaactgccctagatgcaaagccggaacaatttaaagtctataaaaccggccttcgtcatgttggtatcgaaataccgtgggacaatgtgcaaacacttcaaatgcaaaaatttatcataaagaacattcaaaatctattggcaatgggttactggattgatgagattgttttttatgtaaatgttacaactaccgagtacattggtgccgcttcaattgatgaaacggatttaaacattgatgttggttccagctggtggactggctgggaagagtcgcaacagaacacagaatatattgctaccgctgtaacagcggaagacgtaaatatgcatcaggtaacaactacgtggtggacaggttggcaagaccaacaaccatgtgaatcttacattggtgcaaaaccattggttatcgtttcttacaaaatgatagctaattagaaaggaaactatggatacaacgactagtaaaaaaatgaatcaggcgctagttacagatatagggcgtaatttgttttcaaaactcggatcgggtaaaggcgaaatcctttataccaaagccgcactttatacgcaagatttaagcggaatgaccgatgaacaaattagggctttgacctctttagctggcgaaaagatgacaaccggcattaaggtggctgacatctcaccggttgataaagaaactaaacaagtagacatcgaatttgcattttcaaatcacgatttaaatgaggatatcaattttaagtcgattgggctttacgcaaccattgatggcggcaaagaagaaattttagtcgcaattattccagctattggtactgcaacacttggagcaggttcgccagatcacacatcaacacagctaatcaagcttggcgttgcgtttaaactcggcgcagctgccaaaattaacatcagtgtaaagcaaattggcgtagtttatgatgaagatttagacgcagctattttgaagcttaaagcggagtatgacccaaaaattgcagaagcgggcaaggttaagggtgcaaagatcaacgacggagcggttgttgaacccgacaaggacggcattcttgacttgatcgttgacagtgaccgcattaaggacattccagcaggagtgacagatttaaacaatctgactgagtccggtttatatcgcatgccgaagaatgcgaatacctttgctaatagaccacagttggcctccttatttttgcaaaacagcttcttaaaagtaattaatgacgttggtaaaactaatactatcattcaaattttagtttctgccatgagtggggttatttttgcacgtgggatgtgtggagataccaaagcctggttcccctggacacgcattacaccaagtaatacgttgtctaacgatgacattactaacatgatcaaatccaaggtcgatggcttgaatgtcggtcaatttgtgaaaaaggttaatggcttaacccctgacggaagcggcaacgtaaacgttacctcaactgttgcccgtggttttgatgctaacgcaaacgctacaactaagatgacggaagaaaacctacacggcggcaatcagattctgatggatcagaatgcaggtcaagacattgttaactggaccaagggacaattaaacggcaaactgtccaactctggtggagacatggcggaacatagtactatcaactggaatggcgcgggcgcagttgaatcgcatgacggtaacattggcgggttaacatggagtggcgctactgataatgtcagactgtttgcagataacgatgctaacgacaacttagacctggttatccagctgggggacgataactctaatgccgttgtaattcgcaatagcactggcgcacaggtagctcgcgttgatgctagcggtaatatttccagtccaacgatcaacgatttgcaaagacagatcaacgatttaaaggaagacaatgttaacaagcaaaagcagattaacgatttaatcaacaatgtaacttacattaaggacaactacgtagagggtcgtcgcttcccagcaagtcaagaagcccaagcccaagcctgggaaaatgagaagcctacacggttggctatgattgaaaagtaatagaaagaaggtgaaagcatgctagaccatctaattttgaatacaaaaaagtggtttgaaatttcggatagtgatacttcaattgttgccaatggtaaaacatggagcccacatccagcaactgtgaccgtaagacaaggcggagtaatagggggcgctaatggaagtgctatttcaattggtagatctacctttagatgtgttggcacggctaacaattactatgcaataactggaactgcaaatcgtaatgggcaatgggaagatttgccagacacatttccaatatatttgtcttgcgtttcagcaagtgacgttgaatccgtaaattgggggggtaaattccttcctattcgtttgtatcaacgacttagatcacttctttacctgcttagggaggtggctctatgattgaaaagatgatcttcaataaaaatgattatcttatgttccctaaaaaggtcaaaattccccaaggagctcaaataagtaccatttttacggattttccaaatactacttactgttcaatgaacgcagatctggaactggacgtatgcgcttcttcgaaaaacggctatctagttggcagaaatagggatttgccaattatcagtgagggagatagtagcaccacctatggtcctgtatgggttcgaaaatcggactgtacggaaatcttagggggggtaattagcccgttaatccacctataccaagtacttagagccgccaccagaaaggcggtggctgtatgctagatcacatgaagtttaataaagaagactactaccctacaacaaaaattattgtcggttatgtaaatatagaattaattggcagagtggtaacttacagtaaatataaagtaggatggtctgatgaaacaaccattagtggttgtaatggatattctatcgatagtaatttgcttaaatggaataaaccggatggaataggcggcttagctcctacgggtgaaatcagcggcgttgtggtagatcaaaatcatattccatattatcttgttgactttgatcattggataaataatcctaatactggtgatggagtttacgtaacgtttatcaaagcatcggatatcatgactaaggatttatcaagggaacagttatagtattagcactcattgagtgctttttttatgcaaaaaattaaccttgctcacggggagttcccgtgggcttttttaatagaaaggagccaataaaatggctgatgaaaacacacaagttgcaccagtagcgggcgcagaagaaaacgctacacaagatcaaaacagcgttgctgaacaagaacaggctttaaaggcaaagttcccaacccttacaggctttgtctacttgtcagatcctgacaatgcggatcctgtttggcatcacaaagtaatcccagtttttggcgatgaagcaagtgtggcgctcccatggcaagtccacgctgaaagaccatctgacagctttaaagacccagtttggacagtgggcgccactgattggagcgagaacgacaagaacaatcaagccgttatcttgcaagaaactacacaaaagctggctgaattggacaagaagagcgtagaacttgaccaagctaacgacaaggtagaccaagcattgaaggatatgcaagaagttcaagctcaatcatctaggcaaaacttagctttgatgaagagctttactgaacaaactcaaaacactaatcaaattcttggtgctatgcaaaagaccttagcaatggtaaccaaggcagttggcgcaaatgctaataacgctacaccagctaacccaacaactgatactaagccagcggatcaagcaaccgataagcaatagttaaggaggacataaatcatgactttaatggaacaaattcaagcaaactttttagagatgtatcgtatggactggaaattcggcatctatgacaagaacggtatgaaggacctagtagtacaaggtttcttatcagctgaaaattaccaaaagattgtaggcgaagcttatgcgccaactactgcaacgcctcaacaataactcactttacgtgatcattagtctgctgattttcggtaaaggtttgggcttttaccttaaccgcagatttttcttttatccaccacaactagcgtggatgatgaacaacgtttacttagattgttcaatgatgattgtaggcattgcgttgctggtttacacctgttcacggtacaacaacaataagcttctaggggtgttgttggcacttgtcgtggtgctgctagcaataatttcatcaatcgaaattgaacacgtgatttttgcccatgaaatggagtttgtccagaacgctttgtcaaatacggcggttatagcctttattatctggacagcaaggcattattcaaagcgttaggggtgatatagtgcatgtcgacctaaacagcattatatcggctttgtccgctttgcttttaggctactttacctttaagcaaaacggtaagaaaagtgatatggatagcgtggagaataaccgagattacattgttgaacagaataagcgtttaaacgcggaaaacaaaaaactactcaatgaaaatgaaaaactcagaaaggagttaagtgaaaatgaagccaaacactagaattttagattacgttgccttggtgcaagacggtgttttaactgttgacgatgcaccacaggacatcagggcggaagttaccaagtgggttcgctactttgcaggaatcaaagacgattcaatggtcaaggatactgaaagcactacaccagcaccacaagtagaaaataagccagatgctactgcttttttagctaagaaggtgactgactaatgaatttaagccaacttaatgaatatctttttgtgggatttcttgtctttgttgctatctgtcaaggtgtttctaccggtattgatttctttgcttctaagtcaaaaaagcctttaccaaaggaagtcatgaccattgaccagattgccaagttcgtagtaagtgaagccgctacgctcgacatttcaggtgctgaaaagaaagctaaggcggttgaagctttgctgaaccaagcacaaaaggaaaacaagccccttaccgaatccgtagctaagggagctgtccaacacgcatatgaccaaatgcaagctgatcaagaaaaggctacacaagatgaagatgacaatgctcaaccaattggttttgtaagcggtgatgattctgatgacaaagactagatataagacgtacaacgagtacgtttttgaatcttttggaaaatcgtttgaaaaccaaacgattgccaaaagaaaccaaatgaaaggcggtgaaaaagatgtcaaacttaaccgtatcaaaaagaagtttgggtgctgatgtcgcaagctaccaatcagaaaacgtaagctacgccggcattaaatttgcattgattaagcttacacagggcactggctatatcaacccaaaggcaaaagctcaaatcaagagttcacttgctcatgggcttttaaccggcggctacttttatgctacacactctggctctgtgtcattggcacgggcagaagctaagtatgccgtagaaaaggctaaggcttatggcgtcccagctggtagctacatcgctgacgactgggagcagggcagcggcaacgacgtcaacggctctgtcggttcaaacaccgatgctgtcatagcagctatgcaagtgatcaaagaagcaggatataagccgctagtatatgctggtgcttatgtattgcgtaaccgtctcaacacagctcgaattgtaaagtcattcggaacttgtttatgggtagcttcatataaagtcatgggtcgtcaagattccgctgactttaattacttcccatcaatggacggcgtagcaatctggcaatttaccgataactataaggggtataacgttgacggtaatatctgcttgatcgatttaaaggcaaattcaggtagttctaagcctaaatcaacaaacaagaccggagaatcgctgtctctgcatcccgttgtaaagtggaatatcggtgctgtcgcagtagtatccaattcaaagggagcatacgtttacacaagctccaaactggacaagcgggaaagcgacaagctaaaaccgtgtggttccatgtggcaggtgttcggattggaaaacggtgccgtaaaagttggcaaaaatcagtttttcgatggtcgtgccgtttatgtgaaggctaaccctatcgcatataacgacagcaagcatgctgttgctaagattgttctgccacacacgcatgctcttgatgcaccgaaggcagacgctggcaaagtctacggcctagcccttaattccaaagttgaggtgcaaggtcgcgttggcagatttcttaaaattaaagagctacacgaaggcaagcaggtatatgtgacaggtaaccgcgcatatatcgtgttatagtagtaaaagcaaaaattaaaatttatatatatgtagacaaggagttgaaaaactccaaatatcgtgcaataagccacctcgggggatgatttccctggggtggcttttttgcgttgcattagcacgtatttgacgcttactttttaataaataaatactcaacgttttgttttataaataaataattaatattataaaattacgttaatccgtcattttgtgggaaaagtgtttcttttgcttttgatttctcaaaaagtgtattttcttacaaaaaagtgttgcaaaatacaccgaaaaggggtattatatatatgtaaggtaattaaagaaaaagaaatatgaggtaccaaaaatgactattaaaactttaaacgatcttattactgtattaaagaagtccattgcacaagatgaaaaagatggcgacagagaagccgcagaagttcaaaaatcacagttaaagcttgctaagcgcttgaacaatagtgatgatggttttattgcaagtattgaaaactatgacggtaaaactgtaatgtgtgcagacgatgaaaccaaaagattttacattttctacacaaatgaagaatttacaggacgcagtgcaattcttggctatttaaccactgatgaagctaaacacattttagatgattgcaaagaagttatagatccagtaacttcaacaacttcttatgctgatcgcattgtcaatggctataaaaaagcgatagaaacaaatgacgagttcactaaaaccaagattttacttcaattaaataatagattcctagaacattatgacgatgtatacggtaagagcgctataattaacaaattagtcgatgatataacaaaattgtataaatcgagaattattgacttttcagatttaaatttgatgggcttatactcaaatgactaaaataatttttgacaaaaataagataataacagaaacaaagaaggcggttttaattaaaacaccttctttctataagctatggctgccaaaatctttagtaaaaagaaaaatgtggtttttagaggctttccttccttcaaatatgaaatttaagttatttactcaaaatagtgaattaatttgtacaaacaaagaagtatggagcgcttttaacgacccagattttgtggcaatacaccataaggatgaagaagttatataccacaagccaaagaaaatgacaccaaagaaggtgaaagtagatgattcccttaagcggtaatcaaaagaaagcaattgaaaagttagagaaattacgggttggtgcgctctttatggagcctggaactggcaaaactagaacggctgtcgaacttattaactcgtctaaaacggattatgtgcttttcctagttccatttcagactaaaaaaaatttagaaaaggaattaaaaaagtggaggttacgtccaaagtatcgcattgaaggcgttgagtcacttagtggatcagatagactttacttggaattgctgaaagaaattcaagaatacaagtttccttttgtagtgtgtgatgaaagtttaaaaattaaaaacattcacgctaaaagaacaaaaagagttatgaagattggtaaatacgcatactacaaattaattctaaatggtacaccaatatccaaaaatgttttagacgtttatccacaaatggagtttttaagccctaaaattttagatatgagctatagccagtattggaatacctttatagaatccgaaactcatcaaaatgcttgctcgaactatacaattatcaaagataatgtaaacattgattacttatactccaaaattgagccatacgtttttgatgccaaattaagtatgaggatcaaccaaaatgagcataatgtagagtatacttgctatgatccaaaagcatattatcaagctaaacaagaaatgcttgataatttatcttttatggaagacttagactttttagcgatgactcaaaaaatgcaacattcatactccttagatttgtggcacgtagaagcatgtgaagacgtagtaaaaaaacttaaagaaaatacaattatttttgtaaaatacttagataccaaagcctacttaaaaaagaaatttccgcactgtaaagttatgacttatggcaaaggctcttttggattgaatcttcaagaatacaaaaatattattttttatgataaaacttgggattatgcacaattagaacaagctaagcggagaatttacagactagggcagtcggaagacgttgattactatttcttaactagtgatttaggtctagacaaattaatgagaaattgcgttaaaaataaaaataatttacttaatttctttaaagatgcaagtaaacgattggaggttataaatgagctctaaaaagtatttaaatatcaatgtttatgaagctacacaaaaaagattgaaatttatttttggcgaatttgataatgttctagttgcattttcagggggaaaagatagtggcgtattacttaacctggcttatgactacgctaaaagacataatcagttagataaattgggtatgtactttttagattacgaagtccaatatagtactactatgaattatgttaaaaagatgtttgataaatttgatgatattaagcgttactggctttgtttgcctaattcagttcctagtgcaacatctatgagcactggcatctggatcccatgggaaaaatctaaaaaagatatttgggtgcgttctatgcctgaaatggattatgtaatcaatgaagataacgtgccatggaactatcagcccgcaactagtgattatcaagtacaagaagattttacaaaatggttttcttcaaaatatggcaagactgcggttctaatcggcattagaacggatgaatcctacgaccgataccgtgctattaaatccaataacaaggtaaattcttatcacggcaaagaatatttagtaggcaaggacgacattactgttaatgcttatcctgtttatgattggtctgtaaaagatatttgggtatgcaacggtaaacaagcttttccttataataaaatttatgacttgtattacatggcagggatgccaattaatgaaatgagggtggcttctccgtttttatcggagggcttgtctgatctccattattaccaagtaattgagcctaatacttgggctaaaatgctaggtcgagttaatggagttaattttgcttccatttatggcaaaactaccgcaatgggctggaaaaatattaaccttcctaaaggtatgacttggaaaagctacttaaaatttttattatcaacattgccgaaacaaactcgaaaagattatcaaaaaatctttaaaaccagtattgaattctgggacaaaaagggcggtgtgcttgacgatgaaactataaaagagcttaaagaagcgggcatccctctcgaaattaaaggtaaaacaaattataaaactgataaaaaagctgttgtatttcacgattacccagatgatgcgccagtcaaaaaatttagaactgttccttcgtataagcgtatgtgcatcacaatcatgaaaaatgaccacacggcaaaatatatgggttttgcccgaaccaaagcacaagaagaaaagaggagaaaagcaattgaaaaatacagcaaaattctgtagtccggcatataatgttagaccagttccaattgaaaaaattcaagcaaacacttacaatcctaatcatgtagcgccgccagaaatgaaattactttacgaatcgattaaagacgacggttacaccatgccaatagtttgttattatctaaaagacaaagacaaatatgaaattgtagacggttatcatagatatacaactatgttaaagcacaaagatatttatgaccgtgaaaatggtatgttgccagttactgttattgacaagccaattgaagatcgtattgcatcaactattagacacaatcgagcacgtggcgaacacagtattgatttgatggtcaacattgttaaagaactaaaagatgctggcatgtccgatgcgtggatcatgaaaaatattgaaaatattggaatggatgctgatgagcttttaaggcttcaacaagttggcggtttggctgcaatgtttaaagacgaagattacagtaaggcgtggaaataatgaacgatttagaaaaagcagaagcattaatgacaagtaaaaaatatagactatctgatatttgtaaagctacaggaattcctttaaatacactcaaatcttactcatcgggccgaagtccgttaaaaacggtagcatgggaaagagtacatttgctagcaaagttatatgatctaaaaaatcataaataatgtgctataatgtatgtagcttatagtatgttaacttgacataatgaaaaccgctcacagtttggctgtgggcggttttgacttttacggaaaaagtacggaaaatatttacatgcaattgaaacccattgagttaatttgggtgatttttatagcagtgaaagctatttttacttattaatttaaaatttcaatattgcatgatttttacaaatattgcagagaaatctagatttattaaaaatatttccaactgttacgaaaaaacatttttctttaatcattgtgtgatctgactgtgatggaactgcaactcgaagcaggtattatataaaatgtcaattgcaagagaataataaaacaaaaatgatgaatagtaattgacgttttaatttaaggagagatgttttttgaaaactaaatctattttaactaagactattgctgttgctgctttatcacttgcaggtattggtgcaatcaatcaactagataataatgaagcacaagctgccgttgtgcaaaatgatgcagcagtgtatacaactacacaagctactaccgtttacaataactatgaaaatccagttgcaactggtcaaactctagctgcaggtactaactggaagattataaaaactgcttatgattcaaagggacagaagtggtatgatcttggcttaaatcaatgggtattggcaactaattatactactagctaaaatactcaagctagacaagaaaatacctacactcaaacacaaacgccagctcaacaaactacacaagctagccaaagtcaaagttcatacacttattcaaatgtgaactacacacctaagacgacaacaactagttcatattcatcaaccgcgacaggttccgaagctagtgcaaaggcatggattgcaagcaaagaatctggtggctcatacagtgctagaaatggccaatatgtaggtaagtatcaactttcttcatcttatttgaatggtgattattcagctgctaaccaagaacgtgtagcggataattatgtcaaatctagatatggctcttggagcgctgctaaaagtttctggcaagcaaatggctggtactaatagataactccaagttctgactaagatagatttgttgaaatttcaccttcaacaaacaaagacgactactcgaaatgatccgtaccgtgtcaagtagacagcttaaatatataaattaatttgattaatcagttcgctattgtgcgagctgatttttcttttcatcaatctttttccaaaagtctttatatcttttatcttgttttattggatatgaaattatattctctggattattcttagcttcttttctaacctgacctgcgctcttgccattgaagcgctcctgaggatcataattaatatagtattcaatacttgctttaaaggctttttccatctcttcatagctatttgccttcggataaagaacttctcgcatttctttaattaaaccttgccagccttccattgggccattatcaatacagcggccaattctagacattgattgtggcatgccatgttcttctagctcatgcttaaaaggcatcctggtaaattgaaatcctcgatcactatgaagcattgcatgactattgggctctcttttccaagcagttgacagagcagcgttaactagggctgtatcattgcgcttgcttaaagcatagccaacagggaaacgatcatatagatcaaagatagtacagagataaatcttttgacttgttccaggaattttttcttcagtaatgtcagtgcaccatttttcattgggtttagtggcattgaagtctctatgcaatagattttcggcagtttcttccggtctagcagcttgatagcgatacctcttattaaatctggccttgctagtatagatgccattcacgcacatcaagcgagccacagttctacggtatattttggcctcaccgtctgctagctcattgtttaaagccaaagtcatcttaggagaaccaaagaggctgttattgctctcagctatttctttaatacgcttaagaatcttttgatctcttagttcacgtttgcttggcttatgattaagccatttgtagtaggctgaccgggcaatattggcttgtttgcacatccattcaattgaccacttatattctcggtgacattctttgatcaaactgtaaagagaatttcgctgctgttgtttaagtgctatttgtctttgttttggctgtccagcaaacacatcctttctaattccttcactttttttaggaaggctatctcttggtctttaatatcattttcttttttaagctgttcaatttcacgctttagcctttgagtttcagatagctcagcttcttttaaacgatgaccgcgcctatctgctaagccgtcagttccctttgcgctgtatttttttgaccagttgtatacttgggcatagctgcagccaaatttaagagctgcttccttgtagttccattgatgatccttgcagtatttcactatctgtttacgttcttctagggttgtcttttttctcttagtcatataagcctccagaataggattgtagtccttgagttcttgatgactattatacttgataacccactgctttaactgtgcagcacttcgcaaaccaaacttatttgttagataatcatatgagccttcgccatttaaataggcagctatgcatttgagtttaaaatctttactgtatctttgattatatttatgtggtcttaatgcttctggcccatgatctttaaatgcatatacccattggcgcagtgtagtcttgccagcccctaaaactttcgcaattgaagcaggtgatgcttcgccacttatgtattgtttaactgctttaagcttagcttcatagctaaatttactttttctagacatacaaaaagtcctgctttcatagatagtacaattttatatatttgtactgtctactaaagtaggactatatcaaaatgggtagtcgtttttgcttgtttatttttttaattcaaatttactggtttctacatagagtgtcatatttttacgatagtaatttaaagttttcattgaaagatgtaatttttcaatataatccgcttctcttaattttgaattagacaaaacagagtagacataagacatccgaagcttatgtgtagttaatggcatgccgactattgaacggtcaggggcaatttttgggttaatattaaaatcagaagcgtaatgtttgccatcgcggcgagcaaacagatagggattatcgttattggcaaaattagtgtgattttggatatattctctgacatcattttctttaacttttaccaacaattcatttacatgcaaaatcataatttcttttggcttaaaaccacaagcaatagcagccatcatcttgatagtttcaggatgaatattttttatttgaattaattctgataaatgattttcccagccaataacatagtgttgcttacgattgaagcgattaccacgtaaagtgagcaatggataagtaatgatgtagccatattcattcaaaaaaacaaaatacatctttatgtgactaagatatttatttactgtattacttttcatatggagtttattttcaagtgaatctaaaaagttacgtatatctccagttgtaacattttctacatttgcttcagtagcatctaaactaccagaataataatcccaaaaagttgaaattgaagaacaggctagagaaatagttgaatcggctagtttcttttgttgtttacagtaaatgcgaaatttatcttcatatggaaaagtcaagattgaggctcctttcaaacattcgttaaaaataattatacattatttcaagcacgttgttactaaatttttttattaaataatcaaactgcgtgtcgctttgcgacacgcacacaatacaacttgccaaccaaacagaaaagtcgtatgatgataactgtcaactgaataggcgatgacgttcgccattaaccgagtaaaatctaatgacgtctactttatccgataggggtaaagtagacgtttttttgtgggaggaatctgtttgaattcaaaatttattaattacattagtatcgctattttcgccttttttggtggtatggcacgtgctggtttaaatgcaaacttcagctattatggtactttttggggtaatgtcataggttgctttttattagcgtttttcacctacttttttattgaaactaaagagattaggcagtggcttgtagttggattaggtactggctttgtaggtgcatttactactttttcaacttttaatcttgatgttttaaaaaatatgcaggctaatttgccaatcgaagcagtaatttattactttagctcaattatttttggctttttttttgctatgttaggaatgaaaattggtaaaaaagttggtcaattagtaagaaaggaaaggaatacacgatgaattttttgcttgcaggaattggtgcatcaattggagctatgcttcgttatgctattactaattatggtaaaaagcattgggaatggattggtaataaattttctaatttacctacaccgactttgtttattaacttaactggagtactaattttaggcttgatttttggaattggtgctaacacttttatttatgcattactaggaactggagtaatgggtggctatacaaccttttccactatgaatacagaattagttgagctttataagagtaaaaattatcgtggtcttgtattctacgcagtgtcatcatatctgggtggcttggttctagtttattgcggctattatttaggaaatttactaaaataatgttgacagcatgaaaaaaatgggtttgcttgaacagattaaaaataggggattagtcctagatggtgcaatgtcgtatgaattggaaaaacaaggcgtagatactaataataaattatggaccgcaacagctttgattgatcagttgagcaaagtttatcaagcacattgggattggttaatttttataaaaatggctggttccccaacggctggggtggagtatttacaacaatgctaacagtaaactttgctttttcaggaactgagcttattggcattacggctggtgaagcagagaatcctcagaaagctattcctgaagcaatcaggacaacactttggcgtttaattatcttctttattggctcaattgtagttatggccgcattaattccttatcatacggctggagtaactcaaagcccatttgtgtatgtgcttgacctaattcatgtgccatttgctgcaaatattatgaacttcgtagttttgactgcaattatttctgcggccaattcaggtttgtatgcttcaactaaaatgctttggtcgttgggcaacgaaggaacaattcctaaagcattcaccaaaactaataagcgtggtattccagtattgtcattagtagtaagtatgttagacggaatttttgctttgatttctagtaaagttgctgcctcgacggtttatctagtattagtttctatttctggattagctgttgtattcgtttggacggcgattgcatggtcagaattgaagtttagaagggcatttttaaactcaggtcatcaactcagtgaattgaagtacaagaccccatggtatcctgtaattccatattttgcatttatatcaagcctgctttcttgtgtattaatctggttcgatccaacccaaagagtagcattgtactatacaattccttttgtagctatttgttacttgggacatcatttttggctaaaatctaagaaaaataatgaagaagttttattggaaaaataaaaaagtcactagtgatatatgacactagcaactttctatagcttatatactgcattaaaacaagatcagtatataagcttttttgatacatgtaaaaatttttattcggcgtccttagtcaattcatagatagcttcggcataaatcgcaattgaattaattaggtcatctaccttcatatattcatttgcttggtgcataaccattggagcatcttcaggttgagcgccatatgcaactccatgcttaaataaacgcccataagtcccaccgccgatcacgacttcatgacctttattaccagtctggcgttcataaactttgagcaaggtttgaactaatggatcgtctccaggtacataatgaggttcttcaaatgaagcaaaacttggaattaagatatcaccaaatttttcttcaacttgattaaccatcttatctggatcagtaccttgaggatagcgaatattatctttcaaaacagcatttccattttcctcgtagtcaaacattgatggagcacttgagagatcacccatcaagtcatcatgatgagcaacgcctaattttttgccgttaaagtcttcatgttcaacatcggctaagaaatgaagccagcttttatcgcgaccagcaaaatcaaattgatctagaaatactgccaaaaatgtagccgcatttctaccaacttgaggtgcagatgcatgggcaccttgaccagttaattcaatcttagcttcatcgccctcaatagtgaattcgccttcaagtttattatctgataaaaacttagtatatttttccttcattgtggctaaatcactaccaacaatagttgcataggccttttgaggagttacgttttcggcaatgccggccttgaatgacttaaggattactgatccctttttattgtcatctttaaaggtcatggtcagggtatagatcccttgttcaccgttgataattggaaattcggcatcaggtgagaatacttgatcaggggttggctcatgttttaggtagtaatcaatgccaacccaattagtttcctcattggttcccacaataaaatcaatctttttcttaggttcaaatccagcttctttaagtaaaagcatgccataatatgcagctagggcaggacctttatcatcggcagaacctcgaccaatgattttaccatccttaattaacattttaaaaggatcagttacccagccgtcaccagctggaaccacgtccatgtggccaataatgcctaaacgtttttcaccagtaccatagtcgacacggccagcgtacttgtcaacatttttgatatggaaaccatcacgctgtgcaaacgataagaatttcttcattgctttaactggacctggaccaacaggatactcttcggaagtattattcaaatcctcagatgagtcgattgcgattaattcgtcaagatcacgaagaatgtcgtcctttttggcttgggccaatttcttatagtctaaattcatattctgcctcttttcttattttttgttagctgaaattttaccagaaaaattaatattaaacaattatacatttaaaatgggaaaataatgagcattaaagttgtttttagttaatcgtgtcatgtacactataagaaataatatagataaaaattacagaaagtatatagaaacggaaagattattatgagacaacatgttcctgaactcgatcgcaatttaagtaacgacgaattcctagatctaatcgttgattgtttccattcagtaatttttggtaccgttgatcaaaatggtgatccacataccaatattatcgatattgactttaatgaagatggtcgtctgatttttgcaacgactaatcagaagtcattttatcgccatattaagggacacaataaagtttcaattaccgctttgcgcggaagagaaactctcactagcattggtttcactctagaaggctatgttgatgaggtaagtccacaatatttagaacgaatttataaaatcaaaccaccaatgcatcatatttatgctaataaaactaaagatatgaacactttacgagcttttgcattaacaccaattattggttctgtttatgatttacggtttgatcatgtttttcaaaaacaattcgactttgttaatgttcctagtaagatgcaggttgaaatcttagaataataaaataaacatgcctcgattttcgaactgatcgaagcatgtttattttatatattcatttctttacgttcttcgcgttttcttaagtatggtagtaagaagcctaagccaaagagtacgataactgtaataatattcataattaattggtgattaaaggctgcgctaccgaatgttgcttctgcttcttgaggaataaatcctaaagtagcacagataaaggtaaagattaagcaccaccagcccatgataagggcaccagtcttatttttaatgaagacataatctgagtggaacttctcttggtgcatccgtaacataatgaaagcgaagaatacccaacaagtcttgtatggggaaataataccattgatatttaaaagccaattgtaaattgaattaatatttggcaaagtcccagtaagtaaaagcaagaataaggctaaaccacaagttaaagtgtacgagtgaactggacgacctgttttgtcttttttcccagttaaccattttggcatgaatttgtcggcaacgtcaccggcaaagacacgacttgatgcatcaagtaaaactgctaattgggccatcataaagagggcttgaacaacagcaaagatgtacattaatactttgccccaaccaaggctttcgcctagtagttgaaatgcatagtaaggtccgttcatcttgaaatcatgtggaatatgatgagcattgaaaaacattgctaaagccaaagtaccgaagatagtcaagaatccagtcatcaaagccaacatccacattgctttaggaaattcgtgttttggatcgcgcatttgtacgatataaggagcagcaagttctgcaccagacatggcgaagattagaagaccagtggtagaaaagtaacgtaaactaaatgatggcttaaatgcggccaagttaaatggttgggtagcaatatggtgtccatgcataactgaccaaacagcaagtaaaacaaagagcatagacataataaacattgcaccaccaccaattaaagatagtagttcaagtgaattcttgattgcattttcaaccaaaataaaggcaagaataatgacaaaggtcaaaatcccaaaccaaaaagtagacatatgcttgtctaaagtattgttgcccaaaataatccatgaaaaggacacaataactgaattagaaacatcgaccaaataaggaacagtttgaacccaatacatccatgaagtccagtagcccagtgtatcgttagatgaatgacgtacccaagatgccaatccaccggcttgatcagtaaaggttaggcccatttgactagacatcaatgcataaggaataacgtaggcgaagagtaggaaaatccaagatacaactactgataagccttgattttgaaatggataaaaaatattttcaaaactgataatcgttacgaagtcgatcaatgcaataaccggccatgacatgtagtgttttttgccgggttcgaaattgactgtttcgattgtttctgacataaaaattcctccaagttaagctattttattgttgtgttgacatagctgttctcggaggcgagcaaggcaaatgcacttgttaaaaacctccaatatttatataataatttcagctgtagcgtattttaagaaagaatgcaaaaagtacgctatactgtagaaaaattataaagactttttaaagttttgcaatatgtaaaacggtttcgtggacaaaatggaaagaaaaaggatggattttttgaaaattgccattggaaatggcgtcaatgttaataagatgaaaggttggtcgtcaattccaattggcgatgtacaaaatagtgctgaacttgccgcaattgttgtcaaaaatgatgatgcattaggaataaaacaagcagaagctctaagagaacaatctggctttccgattccattgattaaagtaactgatcaggtagatgaagaccaagtcactcagaaagctacagaatatgaaaagcaaatggtgccaggctttttgaccgacttgatcaattttgctcaagcaaaaccaatttcatttactacaccgggtcaccataatgggcaatattatgacaaacatcctgccggagtagtttttaataagttctttggtaaaaatctaatgtttgccgatacaagtgatactgttcctcaattaggggatacaatgacgcatgctggaacgccacttaatgcagaaaagaaagctgctaaaacttatcatgcagataaggtttacttctgtaccaacggaacgacttcagctaattctatttgcgcaagtgcacttttatctgaaggcgatctagttttatttgatcgaaataatcataaatctttgtataattctgccttggtaatgagcggagcaaagccggtctacattccaactgatcgaaatgcacttggactaattggagaaatggatccagccttcttaactgaagataaaattagagctgaagtagctaagatagatccggcaaaggcaaaggctaagcgtccatttaggttaacaatcgtacaagcagaaacctatgatggagtcttttatgatgcacagtggattattgaccgaatcggtaaactttgtgattatgttctgtttgactgtgcctggggcggctttgaagaattcgtgccaattatgagacatttatcaccacttctacttaacttgggtcctgatgatccaggtattttggttactcagtcattacataaacagcaagcaggtatggctcaagcgtcacagattctaaaaaaggatgctcatattaaaggacaaaaacgatatgttgatcataagcactttaatcatgcttatctgaagtttgttacttccagttatgcatacccactttatgcttcattaacagttaattcctacgttactgctggagcaggaaataaaaagtggtgggatcaaactctgcgaatgggaattgaatggcggaaaaaactactcaaaaagtctaagctatttaagccattagttcctgacaattttgccgaaatttcgactgatgaattggctaccaatgcagaatattgggaaatgggacaaaatacggattggcacggtttccgtaaaatggttccaggcgaagcaatgattgacccattgaagattacggtaaaaactcccgggattgatgttaaaaatgcaaaatatgagaaaacaggtattccaggcgcggtagtggcagaatacttaatggaaaatcatattattcgagctaaaaatgatttgaattcattgttgtttttacttacaccgggagatagtcaagcagaactagatactttacttgaagcttttttaagttttgaaaaacactatctagaagatgacttaatgaaagatgttttgccggttttatataatgagtatccaaagcgttatcaaggctataccctgaaacagttgtgtcaagagatgcatgagtactatcaggaaaataatacttttgtattacagcaaaagctattttctaaatcagggatgcaagactatcaaatgacaccagctacagctgatcagctttttaaaaaagatcaaaatgaactggtcaacctagaaaatgttgttggaagaattgctgccgaaggagctttgccatatcctccaggtgttttcattgttgcacccggtgaaaagtggggaacggtagatcaaaagtactttgaagtcttggcgcatgctattgaaaagtttcctggttttgtgccagagattcagggagtatatctgagcgaaaataataatggtagtttatgcgtacaagcagaagtaatcaaaaataaatagggagttaaaaatgagtttttcttggaaagagaatttaccaaaagagttaaacgataaagtgactaaagttgaaaaaatgatccaacctcgtttagaaaaaattgatgaacaggttttgtataatcaacaacgtgtattggacctatttagaaaacatcatgttggtgaagaagatctagttccatcaacaggctatggttatgacgatataggtcgtgataaaattgaggatatttatgccgattattttaaaacagatgatgctctagttcgtccacaatttggctcaggtactcatgcaattacagttggtcttttcagcatgcttcgcccaggggataccctttattatttaactggaacgccatatgataccattcaagaagtaattggtcttgctggtaataagcccggtaacatgaaggaatggggaattaattttaagactactgaattgaagaatggggaagtagactacgaccaagctaaaaaagatatcatggatccttcaattaaagtagtggcaattcaaagatcattaggttatgcaactcgtaagacttttactatggctaagattaagccaatgcttaagttcattaaagaagttcgtccagatgttaatatttttattgataattgttatggagaattctctgaatgtgaagaaccaactttttatggtgctgatatgatggctggttccctttataagaatgctggtgcaggtttagtaaaaggcggtgcttttttagttggccggcaggatttaattgatggtgctggttcacggttgacagtgccaggagctggaaaaggtgaaggcgcaacttggggttatttgcgcgatatctaccaaggattctttatggcagctcatactactggtgaagctcaaaaaggtatggtctttactgcagccttattagaagaaatggggatgcaggtttcacctaaatggagtgatccacgtagtgatattgttcaaactgtcacttttggtaaacctgatccgatggtaaaattctgtgcggctattcaacactattcaccaatgaattcatttgttgacccaattccatatcatcaggatggttacgaagatgaagttgttatggcttcgggaagtttcgttgaaggatcaacaattgagctttcttctgatggccctttacgtgaaccatacatgctttatattcagggcggtttgtcctatgctcatgataagattgcgattactcatgcagtagaagaaacattttataagtaaatttaactctaaaagattcacatttttctttatttaaaagtgtgaatctttttatcttgtttggggtgaattgttaatttagaataaaaagtagcaatttaactagttaggataagtttatgaatccagaagaagttttaaaagatacatttggctatacaaattttcgcccaggtcaaaaacaagtaattgatttagttttaaaaaagcaaaatgtgttagcggttatgccaaccggtggcggaaaatcaatgtgttatcaaataccagctttgattaattccggtgtaactttggttatttcaccattaatttctttaatgaaagatcaaattgataatttaaagcaaaatggaattaatgcggcagcattaaattctactacaccgcaagaagaggttaatccaattttacgtcaggcatatgaaggcaaaattaagttaatttatattacacctgagcgtttagcgattgattattttagatatcagttaaattttttagatattgatctagttgctgtcgatgaagcacactgtatttcacaatggggacatgattttcgacctgcttatcgtcaattattagatggaatcaattcactaaaaagcagaccaaatatattagctttaacagcgacagccacgcctgcggttcaagatgatatttgtgaacaattgaatattcccaaggagaatatgattgttacctcttttgctcgccctaatatatcgtttaaagtggtcaactcaccacaaaatactccattatatatttcagaatatattaaggcacatcaggataaagcggggattatttacactaatacacgtaaaaaagttgaaagtttgacagattatttggctaagaaaggaatctctgttggtgcttatcatggtggaatggattcttcagaacgaagtcaagtacaagaagcttttcaatttgatgaatttcaagtaattgtagcaactaatgcttttggaatggggatcgataaaagtaatgtcagatttgtgattcatgcctcaagtgcccgtaatatggaaagttactatcaagaagcaggtcgggcaggccgtgatggggaagaaagcaaagcgattttaatctatcatcctggtgacttgcgtcaatatcgctactttattgatgaatcagatgcggatgataaatatcgagaactgcaatatcgtaagttgcaaacaattactgattatgctaatactggtgaatgtttgcagcaatttatcgtccgttattttggtcaagattgtccgccatgtggtaaatgttcaaattgtctaaatcaggataaattgactgacattaccattgatgctcaaaaagtgattagtatggtttatgaactagatggtcgctttggaaaaacgatagttgctcaatgtttgattggctcaaaaaatcatcgcatgcaagaaatgaatgctacacaatataagtcttttggctctctaagaatgaagcaaaaagatgctataagcttgattgactatttaattgcttcaggttatctagaagttgaaggtagcaaatatccactagtgcatgtaactaatcatgggtgggatgtactagatggcaaaactgtagtcaaacggcgaattgctaagatttcagtaactactactcatgctggtgaagaaagtgatactttatttgaagctttaagacaaaagcgtttggaattagctaagcagcaaaaagtaccagcatttatgattttttcagatcgctctttgcacgatatggcacaaattaaaccacaaaatgaaagtgaatttttagaggtaagtggtgtagggcaagcgaagatgaaaaagtatggtcaggctatgatggaaataatcaaaagaaaaggaaaatagctaaaataataatattaaaatacgcgtggtgctagttaaatcgttctagacaataagccaaattataagctaaaattgcaatttccaaccggctttgaaagcctatcagactacgtgctcgattgttctcggcattgtaatagatcagaagcgaaaagtcgctttcaattgttctgcgaatagccatcaattgatgatcattgtgctttttagctcctgtcatatttttacgatatggtgtccaaagttcataacccatttgttttagctgttgatgcagttctttgcctaaatagccttcgtcgccaagaagatagtaattagatggatgggcattttccagcagttcaactgtctccttggcatcatgaactgatgcttttgttacgacataatcaagaatggaaccgtcatcgctaacaatggcatgaactttgaaaccatagaagtaaattttcttggtggccttataaccaatgttggcataaccgcgaaaaattttagcacgatagttgcgaattggttggcaaacaggtaccggaaagctgtcaatgatcaagaaatgtccattcaggtcaacctttttattcatttcttgccgtatctgataaatcaattgcaatagctgacgtgaacgccgattaaaacgtgagtgtgataaacaattgaaacattcacagaatcttctttgtgattcaattcctgtcttagcttgccagataagtaaagccaaaatcagactgtccgtagttttaatttgatcaatatttcgccgatgagtaaactcagccggtgcatacaaacgataccagtgccgacaaattatcactaaatctttaaaactaacttgtaaatggtggctaaaacgcttaagcttaaggcagttcaatcagatcaggctcttttctattattatacaagttgagtctaacaagattggacttttttattatactgaaacttgaaagctaagattaacgctccttccccgcgcctcttggctttttcttatcaaaaataaaaacgcaggctctctctgcgttatactttaagtgtcgacctaaaaagtaaaggagatcctgcgcaatgaacagtatagaacaaatcgacacagaaaatgatactaaatccttaatttcttcatttattaatctaattggtctagctaagttaactaaacaagtcaattttaagcgtaaatccaccgtttcattaaccatgattatctcttggctgatgtcagtacattttgctcggctttctttattcagagctaaggatgacaaacgtttttccgttagaactgctcgcaatgtacttaacgatggaagaatcaactggcaaaaactattatgcttgattgcagcccggctcattggctgcttaaaaccatttatcgataaaagacgccgacttgcttttatcgttgacgatacgctgatggctcggtctttttctaaaaagaccgaattgctagctaaagtctatgaccatgacaagcatgagtatttgaacggatatcgtggtttaactttaggctggagcgatggcaataccttcttgccggttaactttgccttgatgtcaaccaaaaccaagaaaaatatgattggagctgctcccattactgctgatgaacgttcaatttctggtaaaaggagaaatcaagctcagagaaagatgaatgatgtaactgtagagttgattagacaagccttacgattaggagtagaagctaaatacgtcttattcgattcttggttttcttctccaagaatgttttggattttaaagaagatcggtttagatggacttggcatgatcaagaagagttcaaagatttattacatttatcgccatcgccgctatagcgttaaagacttgtatgatcgtttggctgcttcaaacatccgtaaaaagaaacattatctttattcaagcatagttgaggctcaatatcatggacatagctttttattaaagctcgtctttgtctccaaccgtggaaacaagaacaagtatttggttttagctactactcagacaaagcttagccctgaagaaatcatccaactttatggtcgtagatggcaaattgaaacatattttaagacgtctaagcaatatcttgctttagataaatctcaagttcaaagctatgatggccaatgtggctatatcgcagttacagcaataacttatgatctattgacctggcaggaaagacaaaatacagatgataagacaatcggagatttattctatctaatgaacgaatccttacctgatattagattcgtagatgcattggtctacttaatttcagaattaaaagagcttaaacagaatagttttgaaaagatagatgaagtaatcaatgactttattaaccaactgccacgattcatacaaattgcactgaaacagatcatataaaaactaattacgtctaagaaagctcaatagtgacaggacttgagcttgattttggtgctttcaattttcagtcattaactaaaacgatttaactagcaccacgcgtattaaaatattggtcaaaccggtctttttttattacaataaatgtaaatgaaagaaggactaaatttatggctaaaaaaacattaattatctattattcttgggaaggcaataccaagaacatggctaaaaagattaacggagaaattgaaaacagcgaattaaaggaagtaactgttgctcctgacgcttttgattcagatatgtacaagaccaacgatattgctctagatcaaattcaaggtaaggttccttatcctgaaattcaaatggatgatatcgattttaataattatgatttgattttagtcggtagccctgtttggtcaggctatcctgcaactccaattaagccattacttgaaaagatgaaaaactaccgtggtgaagttgcatcattctttacctcagcaggcactaaccataaggcttatgtcagtcactttaaagaatgggctaatggtctgaatgttgttggtgttgcacgtgatgatagtgaagtccgcgattgggttaaataattaacctttagaatattaaaaatcagtacaaactccgtgttttgtactgattttcttttgtattttaagaacaaaaataagagttacaaaatgtaaccctcatttttatttaggacacgaatcaagcgccgttacgcatgactcctagcttgatgggtgtctctaaatatgtggtatttttatatctatcaaaagaaaaaacaacggtttctttaatcaatatcacaacaacacctcatttctatgtctttcaaaagtaagcgcttactttatctacttataatatatcatataacacatatttttaatagtaattttgtcataattttccaaaaattggtttgcttgttggtaattcatgattatagattaaaagagataatgactaaataatggaaaggggatatttaatgacgattccaacgaaaattgaagttcgtggcggacgagtacataacttaaagaatattgacgttgacattcctttgaataaatttgtagcaatttcaggactgtcgggctcaggaaaatcatcactagcaatggggattctttatgaagaaggttcaagacgctatcttgatgctctgtcaacttatatgcgtaggcgaattaaacagggaaatcaggttgatgtaactagcgtcaaacatattccctccgcattagctttacggcagcgtccaagtgtaccaaatgagcgagctacagtaggaaccttgagtgagacttttaatgttttacgcttaattttctctcgtttgggttctccagtttgtcctaatggacaccatttgaagccaagtttggcaattgcaaaggcaatgagtatgtcaggtgagcaaatgggacaattaacttgtccagtctgtggtgtaaaattttatgcaccaagtgccgaacaatttgcttttaattcagatggtgcatgtactgagtgtggcggaactggtaagatacggcaactagatgaatctaaactgattacggatgaaaatttgtcaattaaagatggtgcagttgcatcttggagcttgccaggacggaactttatgcctaacgttgcagaacatgctggtgttaggatcgacattccttataaagatcttactgataaagaaaaagattttgtcttaaatggtcctgaaaagaaatataaaatggactttttatcaggaactggcagggtatttcatgattttaatgccttatatgaaaatgctcggcaagctgtctatcgttcagcaaagagtagcaaatcggaacgtgcgcaaaaaagaatagccgaattctttacttattcgacttgtccactttgtcatggtagtcgtttgaaaccagaattgttacaacagctggtcggtaagcaaaatattaatcaggtggccgaaatgcagttaggtgatttagttacctgggttaaagatgtgcaagcaactttaccaactaatatgcataaaatggctcattcgattattcaggagtttttggataatttgcaaccattattagacttggggctagactatttgactatggctagaagtggaaataccttatcgacaggtgaattgcaacgaattcaattagcaagaacattacgtactgaaactactggaattttatatgttttggatgagccttctattggtctccatcctgctaatgttgcaggattaattaaggttttacgaaagttagttgctcagggcaattcattagtagttgttgatcataatgttgacattattaaagccgctgatgaggtaattgagattggtccaggttcaggtaaaaaaggtggtcagattttggatcaaggttcaattactgcaatcaaacatgatcaacattctttaattcgaccatatttggatggtagtgctaaactacttgccagagagccagccactcgaataaattccgattctattttatttgaagtaaagcaatattttaatttacatgatgtaaaaactaaaatcccactaaaccaattaactgcagtaactggtttttcaggtgccggtaaaactagtttgattctggatagtttagtacccgctattatagcaaaaagccaaagtgaaaaattgccaaaacaaattagtagattttctagcccaatttcaaatgtagtaagtgttgatgcatctccaattggtaaaagtactcggtcaactgtagcaacttatacttcaattatggacaatttacgaaagttatatgctagtcagccactcgctaaaaagaagcattatacatcaagttggttttcatataataataaacaaggagcttgtcctacttgtggtggtacaggaattgtgactcttgacatccaatttttaccagatatgcaacaagtctgttcaacctgtcatggcgatcgttataatcaagatgtacaaaaggtgaagtggcatgatctgtcaattgttgatgtcctaaatctagatgttaatgaggctctaccgatttttgttaaagtgcctaagattgaacgagagctaaaattgttaaaagaagtaggcttggattacttacatttgggagaagatacaccaactttgtcaggtggagaagctcagcgccttaaacttgttactcatcttagtcataaacaaaatgatgcattgtttgttttcgatgaacctacgattggcttgcatcctcttgacgtgaaggttctggtccaagtaatgcaaaagttgttagatcagggagctaccattattacaatcactcatgatttaaatttaattgtcaattgtgattacatgattgatttaggcccacatggtggtaaaaacggtggtcggattgtccaagagggtaagcctttagaattaaagcaaaagcctgaaagtttaacggcacactatttggccaattatttacatgatttcaaaaatctattttaatattatatgaaaatagcattaaataaatttatagcaaactgtagctaaaaaataagacataggaagaaataatatttgaaacagatctaagattaatgcaatattaaatatatattaactatctactcaatttatactaaggtgagaaaaatgaatttgctcaaacagatccgtgatcgaggattaatcttagatggtgcaatgtctacagctcttgagaagttaggcattgatacaaataatgaactttggacagcaattgcattagaacataatcttgctcaaatttatcaagtacatatgaattattttaaggctggagcccagatggcaattactgatacttatcaagcaaatatcccagcttttgaaaaacatggttttacacaagaccaggctactaaattgattactaatgcagttcaaattgccaaaaaagcccgtgatgattttgcaaagacaacgggaattcataattatgtagcggcttcagtaggaccttatggtgcatatttagctcaaggggatgaatttcgcggagattattctctaacaacggaggaatatcttaattttcatttaccacgattgaagattttattggcaaataaacctgattgtctcgcacttgaaactcagcctaaattggatgaagttgtagcaatcttagattggttaaaggaaaatgctccggaaattccagtgtatgtaagttttacattgcatgatacaactaaaattagtgatggcactcctttaaagcgggtagtgcaaaagcttaatgaatatgatcaagtatttgcgattggagccaattgctttaaaccgtttttagcaactgcagtaattgataaaattcatgattttactgataaacaaattgtcatttatcctaacttgggtggcgtttataacgaatttgagcgcaattggattccatttaatgcaaaattcgattttaaaaagttaagccaagagtggtatgaacatggtgctagaataataggtggctgttgttcgactaccgaaaaagaaattggccaaatttccgccttttttaagacaattaacaatgctaaaagcaaatcagttaaatcggagctaaaaaaggttaaaaatgatagcaatatacaaatttgatttttaataattcatatactttttttcccggatttaaaattgaagtgcaacactaagtgttaaacaaaaaggccatgaagacctaaacttgaagtgacgaaaaatcaagaaaggaagatctttatgaccaattcaaattctagcatttctaagcactatcatcaattaaccagcgtacaacgtggacaaattcaagcaatgctggattccggcataacttcccgtactgttatcgctcaagaagtcggctgccataagtcgacaatcagtcgcgaaatcaaacgcggaagtgtcctgcaaagagacagcagctatttattgtatgagcactattacgctgatactgcacagatttattatgagaagcgtcgcaaaaactgctatcagcgcaatccattgaagcattatgctgtctttttgagaatgctctccagacgctttaaagctaaatttgatgccaccagcatcgatgagttcgttggtgaattcaaaaggactatgccaggctacccttgtcccagcacaccaaccgtctatcgctatattgatcagggcttgctggacataagcaatattgatctgcctatgaagctcaaaagacgcaggaacaagcgtcatcacagccatggcggtcacgctttgcacaagaagcatcttggcaattccattgaacagcgtcctaaggaggttgaagacagaaaagctccgctgcactgggaaggagatctggttaaaggcgtcagacgcaagaatcagcctgctttaatgactttgactgaaagaaccacacgctttgaagtagttatcaagattcctgactatcgggcaagcacatgccaaaggctgcttcaaaaggagattgacagacatcctgcctggtttaaatcaatcacgtttgacaatggctctgagtttgcggatatgaccaagatcaagggctgccagatttactttgctcacccatattctccatgggaaaggggcaccaatgagaactgcaatggtcttttgcgtcaattcttccctaagggcaagagcatgaaagacaagtcaaaagcttatgttcaacaggcaactgatgccattaaccacaaatatcgccgaatcctccaatatcacacagcagaggaactcttcaagcaatatatctcttcataacctaactgttgcacttaatttgacaattcaggatatactttttttgaaatttatcaagtaaaaatctttatctttttatttttatttgatatcatagtagcggagcgtgtgatgagcgctccgaggatgaaaaggctaagcaagatgtttcttatgacatctgctgataggaagaaatttgaaggtgtagaaaagccattaaggacattttccttagtgactttttctttttgcccaaaataaatagccgacttatcgtcgactatttttaatcttaaaaattatttttgtctgtttgtggagtaactttatcccaaattgcatctactaagccaatccacattaagcccatagcaactgagccgcaaacatcacttggccagtgagcgtagagataaactcttgaaatcattactaaaacaagccaaatagctaataaaacagtgagccagattttagcagttttatttttaactaaagctggaatcaatattagtattagccagaaaacaataatcgccattcctaatgtgtggccactaggaaaactgaagccatcatcagcagctaagtgagcagttggtcgtgcccgttggattatatgtttaacaatccaaccaaaagcatcagctgtaactagtgaaatgacaatacttgccgaaagaggacgctgctttttcagccaaagaatgacagctatcaacagcatccaaactaagtcaactttagtatctgctaaaaatgtaattacatgcataatgctctgcagattaggaatactgtggactaagccttcaaagaaattgtcaaagccggtaacccaacttgcatgagccataatagagaatgcaagaatcaaaaagatcggtaatccgatacaaatagaataaatattttttttgcgcattttttcctcgtttatacttatttttataacaataatgagtttatcatagaatatgagtagaaagagaaaaattttaaatttgccgattgtaaaattaaattgaacacttgatacaaaataaaaaagtccatttggacctgtttgatagaatgttaataaccacaaaaacatctatggaggtcaaaatggactcactacattctatcatggacaagcgtaaaaaaggaacacatctatcgcttgaagagcgggttattattcaaactcgtttgaaagatcattgttctttgcgttccatcgctcgagaaattggctgttcccctagtacaattcactatgagatcaaacgaggggctgttaagctgtatcacggtaaagttaaacgttataaagcccaacaaggtcagagtgtttatcaaaacaatcgtcgatactgtggacgcaaatcggattttcttaagaagcataagtttattgattacgtccaacagcacttttttgaagatggctggtcgctcgacgcctgcagtaatcgctgcactgctgtaggggaatttaccagcaacgatattgtctgcactaggacgctttataattatgtcgatcaaggcttgttaaacatccataactatgatttgccagagaaactcaagcgcaataccaaaattcatcgcattcgtaaaaataagaagaagctaggccgcagtattgaacaacgaccacaggaagttaataagcgtgatgtgtttgggcattgggaatgtgatcttgttttaggccataagaccaaggacgacgaagtgctgctaactttgtctgaacgcatgagccgtgagttcctaattattaaaatcccagataaaacagctgccagtgtaatgaatgcctttaaaagtctgcgcaagcaatacagcgagcattggaacgatatctttaaaactattacgactgataatggttctgaatttgcggatctatctcagctggaagatatttccaaatcactagtttattatgctcatccatatacttcttgtgataaaggcactgtagagaggcataatggccttattcgcagattcattcctaaaggtgactatattcataactactctctccaacaaatcattaatattgaaacttggtgcaattcattgccaagaaagatcttggcttatcatacaccagatgagatctttgaaagagaattagatcgcatctatcaaacagcctaaacaaaagtgttcaagttattattgcaatttacgaaaattttaaattaattggaaaataatcatggaaattaaagagataaaatctaataagaagcagtatatagacttacttttgttagctgatgaacaagagagtatgattgatcgctatttagaacgtggaattatgtatatcttgattgataaaggaaaagttagatctgaatgtgttattacggttgaaaatggtaatacagtagaaataaaaaatatagccacttatccagaagatcaaggtaaagggtatgctaaacatttgattaattttattgctaagaagtatcaaaataaatatcaaattttgcaagttggaacgggtgatagccccttaactattcctttttatgaaaaatgtggttttaaacgctcaggtaagatcaaagatttttttgtaaaaaattatgatcatccgatttttgaagctggacatcagctagtagacatgatttatttaagtaagcgattaaattagaaagtaggctttatcgatggaagaaaatactaaaaaaatgttggcaggtaaaccatatcgcccagatactgaagaactgaaaaagatttccagtttagctcatcgcttatcacgtgattacaacatgactactgatgaagatgaggtagaacggaaagcaattatcgatcgtctttttccgaatcatggtcaaaatgtatatttacaaggaccaattgaagtggattatggccaatttacacacttaggagataatttttattctaatttcaatttgactattttggatacttgtcccgtaacaattggaaataatgtaatgtgtggacctaacgtaacatttgcgactccattgcatcctttgttgccaactcaaagaaatgctcgcaagcaatcagacggaaaaatagccgatattgaatatggagcagctatcactgttggcgataattgttggttagccagcaatgttactgtttgtcccggcgtaaaaattggtaaaaattgcgttattggagctggatcggtagttactaaagatattccagataattcattggcactaggggtaccggctaaagtaatacgtcagattactgatcaagatcatttaaataattatccatattagaaaaagaaaatgtatacgttctcattgattctttatcaaaattgtaaccccaatgaaaaaaataaatgctaatattatgggtagaatttacataacattgctgggggaatttaaaacgaaacgtattaatttaaaaaaaacattaatcaaatcaaccatttggttaactatagctgcttcaatgcctgttggaatggcaattgctaatgccaatagctcgacagttcaggcagcaagttataacaaaactgaaatgcggagctttgttagaaatacattagctagttattatgctcgtggtaccgtagttatagtaaaagatggacaaccacaacaaatttcttatggttatggttattatggcaagcgattaggtgcgggaaacagtaaggtggtttatcctgtttgttctttgcaaaaagtaattaccggcgcaattatcactcaattaatttctgcagggaagtttacacagtatactaagatctctaagtggtatcctaatttaaaaggtgctgataatattaccgtcggcaacttgatgacgcatacttctggattgacagcagctgatactgaagtaaatagaggacgtgtttattcagaagctgatgcaattaattgggttgttaataagctaaactcaactacgcaaaatcaacctggtaatttttcatacaataataccaactatattttgttagctggaattatacgtcaagaaactggacaaagctacaagcaaaatgtgcaggaacgaattattaataagcttggcttaaagcgaacttatttcttggaagatattccagccgggatgacggatggtatctcatatacctggaatcaaaagaattaccaatgggctcaatatgttaaaaagactcaagcttctcaattggtaggtgctggtaatttgttctcagctccaatggactattaccgtattcaacttggtttaaccaatgggcaaattttgagtcgaacagactttgattatatgactcatttaacatcacgttcatcaaatggttattcaggtggtttatatatgaagaataatgataacttgaagttagcatatggtaacttatataatactcactttggtaactggattcagatgactacagataatcaaaatggtttgattatgttcttaaatcaaactcaaaatgatgaaaacagaaataaacaaattggttatcaaattttgaatcatatcaaggctaatacatttagcgcaaaataaaatttttcatgctttaaacttcatgttaagcttaaagcagggtttttttgattggagtaaaaaagatggttaatggtggcgtattagttagccaagatttatcttgtgctggtcaagtatcacttagtgcagctttacccgttttaggagcatgtggcttgagcccgaccgtattgcctactgcaattttgtctacacatacgggtggctttggtgagaatacttttttaagtttgaataatgaaatggctaagattatggcccattggcaaaaggttggttttgatttttcagctgtatacttaggctatttgggcaaaagagcattagatttttggacagaaaagattagctattttaaacaaaaaaataaattgatcttgattgatccagtaatgggtgatcacggtcaactttatcgtggcattgatgaaaactatgtaataaagatgcgaaatctagttaagtcggctacgattttaacgccgaatatgacagaagcagcatttttattaggcaaaaaggcaactagtaattcattgaaaacagcaacagaatttgcggctgaattatctagtcaatttggtgtctcgaatgtcataattaccggtatttcacttaataaggaaaaaattgcggaagttggaattacagccgatcatagttggtctttaattcagaaaaaactcccaggtaattattttggtacgggagatttgtttgcaagtgcattttttgctgctttaatgcataaagaaaatttagaaaaagcgtgttcaattgcggccgattttgttgcacaagcaatcagggaaacacccaagcaagattcacgtctaggaccaaattatgcagcagctttaccagatttactgaagagatggagtaataattaataatgcagatatttagagaaaacaagaattctttacaagctttagttttaacgggactttttgcggcaattatttatattgggatctgggtgttaagaatccccgttcctgctatggtaggacgcccatttattcattttggaaatacgctaactgctgtagcaattttatatttaggttatcgtaatggtatgattgcgggaattattggtctaggtggttttgatttgttaaatggctatgccgcaacatcatggttaactatgcttgaggtagtagtagtggcttcggttttgacagcagtttatcgaggaatgcactatcaagatagtaaaagaaatattattattttaggtattattgcaggggtaactaagatattcactacttattgcgtttcaattgttgaagctttaatggtggggacgagctttaaagtagcgttagttggagcctttgttagtttgcctgcaactgtaatcaattcaatttctactgcaatttgtacaccaattttatattttgctttgcgggatgctagtcgtctaattataaaaaaggttagataaatcaatagattttacacgaaatttgcaaggtgctatattaaagatattattactggcataaaaggtaggatagtatgaacgaagacctaaagaaaaagaataaacgaaacaatattattattttaacgattgcagttttaattatcgttggagtaatcgcgggttttggcattcataatcaccgtgtggcaacacaagctgcagcagaaaaatatgctaaaactcactttaaccctaatgttacaatcgatggagttaaagtaggaaagctaaccgttactaaggcaatggctaaagttaaccaaaaagctaaaaatcaagttgagttaaaaaataacaaactggtttatagctataacactacagtccaatcattagatgagtccgagacaaaggccttttttaagaagcaacaaactaaaattccatcgactcagacttataagtttactactagtaatttagctacagctaaaaagaaactaactgacttaagcaaagcagagattacttataaaattaatggcaaaaactatcaattaaaggccaaagatttattgaataatgtgacttatcgagataatcgctatcaatttggtgatactagtaaattaacgactaagttaaatcaaattgataaagaagtttcaacattacacaagagctataaatttacagtgccaaagggcaataaagttaaaggcaaaaccataacggtaaagaataagacttggggttggggcgtttatgttaaaaagacgcaacgcttacttctcgaagcatttgccaaaggccaaaaaaattttgatggtgcagatgcactttacggtttaggctacagcacttatcctcacggctatggttattcaaataaagagattggtgatacttatgctgttgtatcattgaaaaagcaagaagtatggctgatcaaaaagggtaaactagccgttcatcttcgtgatgttgttaccggtactatggaaggttctaagggtgatcaaactccgcgtggggtgtggtatatccactataaggaatcaccaagtacattgcgtgggaccaatgatgatggttcaagttatgcttctccagttaagtattggatgccatttaccttaagtggctgtggttttcacgatgcctcttggcggactgattggagcaagaccgcttacctaaagggtggctcacatggttgtgttaatgttaaaccaagtgagattcgaagcgtttggaacaatattaaaaagggcgaacctgtaattatttacgaataacatgtttaagggatccattaagttggatccttttttatgaaacaatttttataaagtgaaaagctatttgattacttggaaaaacagctaaatgtaaacaataaacgtgaaacatggctctgaagcccgatattaccgcgattgtggataaaaatataggtaattcacatctattactaactcaattaatatttttttgaaaaaagagtagaaagatgaacctttgtttgatataatttttatgcgaactaatggtctaaaaatagaaagatgagatgataatagctatgatgcaacaagaggaattagaatcacaggaagaaaaagttaagttttttgatgaagactggttgaattggaactaaaatctttaaatgtataattcacttctgtataattaaagaaaaataaaaatttattaactctttcacctaaaggagtaaattatgcaagtaagaactagatgttttcaaagtttagattacgaagatttgtgccgggttcatgatgcggctcgtttgcaagaaatgaaaataggcggagtggagaaatattttattccgtttaaggaagcaccatactggtataatttctttgattctgagattaggattgtagaagttaataatgaatttgctggctttgctgcgtataagccacataatttagcttatttttatattgatcctcaatttcaacgacgtggtattggtgatcaattgctagcttcagtgttaccaaatattagacggccgattaggctagaagtctttagcgcaaatatagcagctaaagcgctgtatgcaaagcatggttttaaaattatcaaaacagttaaagagtcgtggtggtcagaccccaagtctgagccagtttcaagtgatacgatggaattaatgtaagaaggaatatgatatgagtttttataatttagattatgaagaaaaacggtttattcagttagctaaaaagaatactcgctcatattatgaacatcatgatcagattccttcctcacctggccaagttgagctggccaaggaactagtaaaggaaatgaaagagcttgggcttgatgcttactataatgaaaaaacagcttttgcaattggaaagttaagtgcaaacacagcagaaaaggtaacgcctattggcttctttgctcacgtggatactgcagactttaacgcagttaatattaagccacaaattcacgaaaattatgatggtcagaaaattatcctagatgagaaagataatattgttcttgatccaaccgagtttccagacttattaaatctaaaaggacaaaccttaattacttctgatggtcatactttgctaggagttgatgataaggctggaatcactggggcattagcaatgcttaaatatttaactgaacatcctgaaattgaacacggtgatgtttttgttgcttttggtccagacgaagaaattggctgtggtggtcaatattttgatccagctgattttcctaatgtagaattcgcttatacgttagacaatgggcggccaggagattttgaatacgatacctttaatgcgtcagagattacgatccatattaaagggactgtagttcaccctggtgaagcatatggtctgatggttaacgcaacaactttgatgaatgattttttgtctaatttacctcaggatcaagtgcctgaaaagtcacgtaatcatgatggttatttcttggttctacatgctcaaagcaatgttgatcatgctgacattagcatgattattcgtgattttgatcaaagtgaatataaccgtaaagaacagtttattcgcgatctagttaaaaagatgaacaaaaagtatggcaatagatttactgtaaatattcgtgaacaatatgaaaatatctacaactatattaaggacaagccatatattgtaaatctggctcttgatgcttatcgcaagtctggactaaagccaaatgtacaatcctttagaggtggaactgatggaaactttatttcgcctaaaggaattcctacacctaacttatttaatggtggtggcaattatcatggccgatacgaatatgtgactgttgagcagattgataaattagccgaagtgttgactaatattgtgactgaacatttgcgtcaaactcgcactggtaggaatgaaaagccactagaaaaatattggtagatttaatagccgctttatttaacaaattaatactgtagcattaggatataagtggctagatgaaatatccttcctccttagaagtgataaataccattttcttcattgataatcttgctacatattgcagtgacgctgtatttgcgccgctgcttttttgttattattggtaataaaatacgtaaaaagtacgtaaagttttttcgattagcatttaacaaataacttaaatagaactaccatataggtggctggacgagaatcttctctcgtagaagcaattaataaaccaattttcttcatttataatctaaccaaaaaggacagggatgctcaattgcattgctgtcctttatttttgataatcttcgccgtaaatataacgatgtaattttaggtattgctcatataatctgcgttcattttgattgtcttttggaaaataatattgtttgcctttgagtcccttgggcatataattttgcttggcgatttgatgcggagcttgaaaaggtgactcagctaggccagctcccgtgatttctttagcgtgtttataatgaaagtcacgcaaactattaggcatgggataccgaatgggatgatcactatcttgatcaagtctttcccaaatttcctcaaatgctcctgattttggcgaaatacacattaacattgttgcaaacattagtggatatttagctttaggcattcctatcttttcagcttgattagctgcagtaacaatttgagttacttgttgcggattagctaagccaatataagtatatggaatctcacgcagacgccgtacaaccgaagctaaatctccattttttagcaaaatagcaagataataaagtgcagcatctgtgtcagagccagccatagagtcagaatatgcagctaaataatcgtaatgtttagtggctttcttatcatagctaaagaattgctgcttagtaaacgatttaacatttgctaaggtgatctttttaggattaagtgcatgaacagtctctaaaatgtttaaagcaattcgtaggtcgccatcagctgcggctgctatcaaatttaacgaatttttttcaacttggtgatctactaatttaaggaccttagtacatgccttgttcaaaacagctgcaatatcgtcttctgttagaggattgaactcaaagatttgacaacgtgaccgcacagctggcacaatcgacataattggattttcagtggtagagccaacaagtagaacatgaccattttctaaataaggtaataaaaaatcttgtagatttttggtcatacggtggatttcatcaattaaaagaacgaaggtctgatacttataagcattaataatgttgttcaactgtgctttattatcaattgaagcattaaaggaagcaaagggataatcattctctttagcaataatttgagctaagcttgtctttccggtaccaggaggcccccagagaagtaaagaaatattaacatgctgcttgataatatttcttaaagcctttcctggtcccagcaactcactttggcctaccatatccgccaatgtttgcggcctcatttgttcggcaattggtgttttaaaattcatcaaattccttctttcagtaaggtaagtatactattttctacaatttttttgtaaaaatagcttgtactatcaaaaagtaagttatataatagaactaatgtacgagaagttaacgagtttttttagaaagaggcgtattgtatgattactctttatatgtcaacaagtagtgcatcttcacgtaaggcgagagcatggcttaacaaatatcatctttctttcaaggaaaagaacgtctttaaggaattatctaaagaagatgtccttcatctgttgtctttaactgaaaatggaactgaggatattttatctactcgttcacagtctttcaaacaattaaagaataagttgaatgaagacttgtcattgtctaaaatggttgctttaattactcagaatccaggattattaaagagacctattattgcagacgaccatcggatgcaggtgggctataatgaagaagatattcgtcagttcttgcctcgtgatatcagaaaagctgaattaattgaggcacaacggattgctgatgctgcttaaataagacaaaaaacgatgaatttacctttgtgggtgattcatcgttttattttgctctaaatttttatttagctgaacctgggcgttgcttcttggctacttttttacccatagtcatgttgtcattatatccccatacccaaactgcaataaatgaaactataattgaaacagcactggcaattaggaaagtatagaaactatttagttgagtaggatgggccgggttgaaaaagcttgagaagccaattagaccaccggtaaagccatacatagtaccatgcattaaaccagtaactaggccaccgaaggctgagccaatacaacctgaagcaaagaccttcttatatcttaagttaatcccataaatagcgggttcagtaacaccgcagaaggctgaaatagctgctgcaattcctagctctttcatgtctgctttctttgatttgattgcgactgcaagaacagctgcaccttgggaaaccattgttgcgcagataattgcgtttaatgagctttgaccagttgaggcaatttgttgagcaactagtggcacaacgccccagtgaagaccaaaaataaccaataactgataaaaggcaccgattattaagccgccaacccagccagatgcagatactagccagttaataaagactgcgataccatttgcggctccttgaatgattggaccggtaataactaatgtgatagttgaaactacaaggatagtaattaatggggtaaagatcatttgcaagtaactaggcaaaactttctttaaccactgttcacattctttagctagccaagcagctaaaatcattggaaagatagagtaggaatagtttaagaattggaagttccaagatccaagactaaacattgtcgtcatactcttgccccaagtaatcatttgtggataaactaagaaaccgccaattactgcagcaatcattggatcggatcctaaccgcttagcggctgcaaatcctactagaactggtagaaagaagaaagcagagtcggccatagcactaactgtgacatagaccggactcttgacgctaagtaaagcaccaagttgtggaagggtgagtagtgcaagtaagcctttgatgatacccgatgctgcaataacaccgattacaggactcattgagccggtaataaaaccaattagattactaaaggctctagaaacaggatttttaccatcatcctgattattagtttaaggtgaaggattgtcactaagaccaggcaattgtttcataactgcatcgtaaacattggtaacctcattaccgattacgacttgatattgaccaccagcatgcataacgtcaagtatgccacgttgattttttaaaatatcatcattggctttagactcatctttcaaataaaagcgcaaacgtgtgatacagtgaatcaggttatttatattatctttaccaccaacattcttaataatgaaagtagctaattcatcatacgaaagtttcttgtctgaactatcttcttttgactcctttaaataagctcgagcaactgtatcgccagcttctgctttaccttcagttacatctaagccatcaagtttcatagatgaattggtgattaaagtcataatcgtagtatcaagatcttttgctttaatcatctctatattcatcgtggcaatttggtcaccagctttaacttcctgaccatttttaattactacatcaaacggttcacctttaagtccaaccgtatcaactcccatgtggaccaatacttctagaccatctttagtagtaattccgatcgcatgctttgtttcagcaatcattgagatagtgccgctaactggtgcaagaactgtattatcagttggtgttaaaccaaaaccatcacccatagttcctttgctaaagataggatcacttgttttacttagtgcaattacttgaccattagcaggagcaagtaatgcaatttcgtttttattcataagtgttattcttcctttcctataaaagcgttttcacaaaattcatttattataatattcctgtacgtacaagttgtcaatagatttttatgaaaatgattacatgcctgcaatatagtttttagatatatctattgacatgtacgtacatcaaaaatataatgaacatgattttaagaaaggacaaggtcaagatgactaaagcaaaatctgaactgatcgctcaagacttagcttctaagattaaacatcaacaatttaaggaaggcgagcgcttgcctagtgaaaatcaattgacagagctttatggcgcgtcacgcgaaacagtccgtaaagctttgcagcaattgacctcgttaggattaatccaaaaaatcaagggcaaaggttcgattgtccttaatttggaaaagttttcgtttcctatttcaggaatttctagctttgcggaattaaataaatcattaggaatgaatgcaaaaactaagctacttaatgatgaaatggttgatgatttgccggcaattttcaagaaattcttccctgaacaaaagaagcatgctgggatctatgttgaacgtttaagaatgattaacgatgaaccagaagtgctggactgtgatttcttatttaatccaccaattactgagctgccgccagaagaagcagaaaaatcaatctacaattatttagaaaataaattagggctagatatatcctatgcaactaaggcaattacggtagaagaaatcgatgctgatttacaagagaaattgcaattggatagtaaggaagcagtactagtagctagtcataattttttagcagatacaacgctgtttcagttaactttatcctttcataatcctaaaaagtttaaatttattgactttgctcgtagacagaaaattaagttataggagataaaaatgacagatttaggcaaaaaagtaatttaccaaatttatcccaaatctttttatgattctaatggcgatggagtaggtgatattccagggatcatcgctaaaatcgattacatcaagaagcttaacgttgatatgatctggtttaatcccttttttgtatcccctcagaatgatggcggttatgacattgcggattattaccgaattgatcctcgctttggcacaatgtctgactttgaggaattaactaaaaagctaaaagaaataggcgttggcgtcatgttggatatggtgctaaaccattgttcaaccgaaaatatatggtttaaaaaagctttggcaggagacgaaaagtaccgcaaattcttttacttaagaaaagctaagcctgacggctccttgcctaataattggcaaagtaagtttggtggaccagcttgggcaaaatttggtgatacggattattattacctacatttatatgatccaactcaagcagatctcgattggcataacccagaagttcgtcaagaattgttcaaagtaattaacttctggcgttcaaagggagtacatggtttccgttttgacgtaattaacgtgaccggtaaggatgaaaagttagttgattcaactggtgatccaagtcaggaaaagagtctttatactgatacagcagtagtgcatcaatatttgaaagaaatgaatcgctctacttttggtcaagatcctgactcaattacggtgggtgaaatgtcttcaactactattgctaattcgattgagtactctaagccgagtgagcatgaattgtccatggtctttactttccatcatttaaaagtcgattataaaaatggtgaaaagtggtctaaagagccgtttgatttcatgaaattaaagcacttatttactgaatggcaagaaaaaatggatcaaggtggcggttggaatgctttgttctggaacaatcatgaccagccgtgggcccttaaccgttttggtgatactggtaaatatcgagagaaatcttccgaaatgcttgctactgcgatacattgtatgcgcggaactccttacatttatatgggcgaagaaataggaatgatggatccacattattcttcaattcatgattatgtagatgttgaagctaaaaatgcttttgcggcattgaaacaaaagggaataagcgatgatgaagcatttgcaatagtaaaaactaaagcacgagataactctcgtgtgccgatgcactgggatgatagtaaatttgctggctttagtgaatcaaagccatggcttttaccaacagatcaagatagaattaatgttgaaaaagaattacacgagggtgaaatttttgcttactatcaaaaattgatcaagttgcgtaagcacgaacaactgatttctgatggccatattagaatgtttttaaaagatgatccacaaatttttgcctatgaacgttttttgaaagatgaagctaaaaaaatattagttttcactaatttctatggtactgatcatgtagcaccattgcctgaacaatatcaaaataagaattatcaactcgtattgagcaattattctgcacaagatggcaaactaggagagaatatctcattgaagccatatgaagctttagtaattaaaattaattagactagtataattaattgtgttaaggtaaaaatgttcgtgaagatttcgatttacggacgaggaattcgcgagaagtcatgattttcaggtcatggcttctttttttgcataataattaaaattatgtaaagtaattgacagcttgcttataatagatagtagagagaaggaaaaacgatgttagttgattctgatagttttatttcagttgaaaagaagctaatcaaacaaggcaagttgcaaaaatttgaaaaagaaaatggtccagttaccagtttaatgatgattagtaaaggaaaaattgcggacgatatgcgttatcagttagtcgagaacttggcacatcatccattacatatagtctacaaggcctcatttgatcaatatgatgaaaccctgaattgtattttcgatcgacaaactaaaaagccaatcacaggtttatggtacacgccgcaaagaagagactttactgaaccgcctaagaaaatggtccagctttttatcagtgaaattgtaaataatttgactgattcaacaggaatagatttgccaatctgggtctttatcaatgataaggcacatttggcagttactaagaaagatttgagttaagaaaaaaatcagtgcgaaccctatgtgaacataaaaatgagggagtttcgcactgattttgttttgtattttatgtgttaactcttctttatatacttttgacatagtataatagttgatgaagccaaatatttaggattggatgaaatacatttgccccagtcaaaagtaggttctttgcacgtcgcactctatgtgagtgcttaaattaaattcaactcttgcaaatgcaaaaaagcatccctaatcaaaatagagaagagggatgcttttttaatatcattattgacgccaagcgctatctaatttttgttgaccagccttaatttgagcattaacattttgatgcttatttgcagcaattaaaatattttccataatttgattcataccattataagcagagtcagaattcttagctacaggaacactgtagagatgcttcattgaatcctttaagacacttggcaatttcatcttgctgtctaagtattccttactatttaagacattatcgttaacaggaatatagccagtctcattagcccaagttaattggctagatttgctagtcaaaaacttcatatatttcatggcagcatttttttgtgcttttgaagcatggttaaagacataaagatcagtcccttgagaaatagtgtattcaccgggacgaggagcaacgccgtacgtaaacttgttgcctacacccatcttagtgtagctttcaccagctgaagtaccgatgtacattgcgactttttcattagaaaaaggaccggagaggtaacgttcactaccagcagttctaaagtagccattgcgtacgccatctgcgtagaagttaataattttcttagaggcagccgaatctaacttgattgaacgaccaaaagtttgtccttcattcttgagacctagaacatagtagttggctaagttatcaaaaccagcaccaacaattttatggttggacttttcataaattgctttagaaacagacttaagttctgccattgttttaggtacctttaaaccatatttcttaagtaaggtcttgttataagtcaagacttcaatagatttgttgaagggaataccatattgaacgccattaatttgcgcacccttcattaattcaggacgaatattagatttggctactgagccccaaccataagttgaattattaatgtatggagtcaaattgaccaacatcttattttgcgcagcttgataaagccaaccaggataagcttgagtcattgttggtaagttattaggattttgttgagtagaagtaattttcccttgtaactgagggtaattaccttgattttctagcttaactttgatgttaggattttctttttcaaatttattagtcaattgtttcaaagttttttgttgtgcaccattcattgcgtgccacatagtaatttctgtcttactatttttagcagatgtagtgctcttttgatttgaacaagctgctaaaaataatgctgcagtagttactgcaccaattgataaatattttgttaagcctttctttgtcatcgaattctcctcactaaaaataacattaataaaaatgaaatttaaaatatatttttattttaataagcacaatatcttgtatcacttattaactaatgcaagataatatactactggctaaaaaataaaattcaatccttgactttttgccagcatttataagcattgatatatcaacgactgtttacttaataaaaatattagtagcaagagaaatttaattaaaaacacattttattaaatacaatatcttgtgtatgataaatgtaagaatcaattaagctaaggcaaaataatagctattttatagcaaatatcttataattaataatgaacttaagaaaagaaaggtcgaattttatgaaaaaattagatactactaagcttactgatgaacaaattgaattttttaactcacacttaccatacatggcaactgtgaatgctaacggtgtgccacaagttggtcctaaggcttcacttaaggcaattgatgcttcaactattcaatatcttgaaaagactaagtcaactgcttatgcaaacttgaagaatggttcagtagcagctattgttgtcgctgatgttcctactcataaggcatttcgtgttttaggacatgctgaaattcatgaaggcgacgattacgctaagaagatcgtttcaggcactgatactcctgaagcattcgtagttaacattaagatcgaagaaatcgacgcttaattcaatattttatcgcaatgaggcatccctagcagggatgccttttttgttggtataatgatgagtagttaaagtgaaaatagatttttgaaaaaggtaaattgtgattactagtaaaaagaagccaattctttggttattatcagatacacatctaattgcagatagtttacatgatgatggtcttgcttttcagcatatgcgcaacactagtgcaggtaaagacttagattatcaggagattgctttgaccgcgtttgtacgtaaagtaatccaagagaagcccactgcagtgataattactggtgatgtaacctttaatggcgctaaaatatcaggagaacgtttagctaatatttttaagccattaactaaaaataaaattgcattcttagttttaccaggaaatcatgatatttttgacggctgggctcgcaagtttaaaggtgatcatgaagattacaccccgcaaattagcccagctatttggaaagagatctttgctgattcttatcattatgctttacatgaagatcctgattcactggcttatagcgttaatctgaataagcagtatcgactaatattggctgactcaaatatttatggcaagcaggaatcacaaactcatctgattactaacggtcgaatttcagaatctcaaatgaactggattgaaaaagaattaattgatgcgcagcaaaagcagcaacaagtgctattctttatgcatcataatctgtatcgccataataaagtaatctatcagggatatattcttgataatgcacttgcactgcaaggtttattacaaaaatataatgtaaaagcagtcttttctggccatatgcacgcacagaatattattggtccgtttgctaatcgaccaattgcggaggtagcaggagcttgtttttgtatgactaagcaggaatatggtcagctatatttagacgaagcggggatgcaatatcaggtgcattccttcaaaatggaatcgtggttaactgcggaagaaaagcaaaaagtgccaacagatttttcgcaatatttgaagcatttgttttttagtttggatgaaaagcaactaaatcagattgcgcaagctttatcagataaaaatgatgctaacgtggtcataaaatttatagatcaattgaattggaacttttttgtaggtgaaagtaattattctgcagcccaaaagaaagaaattgttaattcacgagaatatcatttgattgccaaatatttacctggttttaagcgctacgttgattcatttttacaggtagagcaaagtagccataaactgaagcttaagtggtagtgagattagttgctgtaaaacggaaacttctattatgaaaaacgatacagtagaacaaattacgccgagatcggcctctaagtctgttttaccagcaaccggtaggcaagatagtgatctttcatggttagggttattactgtctggcttgagtttaagtggattatggactcgtaagaagaaaacaaaataaaatcgaaagagattgagacactgggtttcgatctcttttttgataggctcaatatcaaggaataaataactataactgctataatgatgatatgagtactaactgatcaaatcttaactgcatttattagatcgaaggttcattatgaaaatcaataaaaaacttatcttaatttctactgcgttattggctgtgtctccaattgccgcagcaccactaacttcaaacgttcaaacatcagttgccgcagctactaaaagcaatgcaactggttccttaaaagtcattgattcacatattatgttgtacaatcgctcgggcaattatttggatcatatttctgcacctaagaaaggcagcacgattaaatactatggaaaaccattttttaagacggttgatccaggcgactacagtgctggtgagttatactatcctttacgcaagaatgtttatatttcttcagattatgtaacgccaatatctggccctgcttatttaacggcaatttttaatgccaatatttacaataagtctggcaaaaaagttggttttgtcaaaaagggtagcgtagtcaaatatgctggtaagcggaaaactactagtagtaaagcaaagtattattatgaggctcaaaaaggtaagtatcgcattccttataccataattaatggaaaagactactattatttaggttccggtcgttatatcaaggtggccaacatcggttacattgacggctatcgtcttactactcatgcaccaattaccgtaacggtcaataagaatacttcaaccattacaaagtatgttaattcaacaggttggggtacagatccaaataatattgaattgaagaaaggacaaaagatcacagttgattatgcgggacaattcccacaacaattgacagactttgatcatgatcactattcatactaccggatcaagggcactaattattgggtatcagaagatgatctgaatttgccacaagctttagagaatcattcagatcttgaattggccgattctaccaaagttgtcttggataaaaagattcctttgtacaatgttgacggtgaaaaaactagccaagagctatctaaacagttttataccaatacggttgaagaaactgcaatgtatagcaaccataaaattaacgaagccctttatctttgggtgccaagtgaaaagaaagccgaacttttctaccatacaacaggtgaagttaatgctaagactaataagttagataatgaaggctatatcttagctagtgatgtcaaaaaggttgaaggtgtgaagcttacaccaataaacacagctggcgaagcagagtcacttgctaaagtggcaactaacaaagcatcgttgactgctgcaatctccactgcagaaaatgtgcaaaagacagatcgctatcagttagctgattatgataagaagattgaatttacaacttatttacagcaagctaaggctattgctagtgatgcagatgctagtgaaattgcagttagtcaagcagaaaagtttttaactaatagcaccaaagcacttgatggtaaaaaattacttgttagacgaactgaccagttaactacttatgaggttcaaaaagtgttgaatcttatctacaattactatcagccgcaagttacaggcaaacttaacgttcaactttataacagcaaacgtaattggcaatatccaacaactcgtccagtatgggatgttaccaagaagagtccattttggtttggctattcttcagataccattagaaagcgcaaagtcgatattagcccattaatcactgatggcattactgttggcaagaaaaagaaattgcaaagtaatgcatacgtttataccgctgcaggtgtgaaaactagaaagctgttgaagaagaatacttcttataagattcaagccattacaactattaaagggcaaaaatatgtcaagattggtgcaaataaatacgttaagtatggcaacttcgaagcatctaagctaaaagtggtcaaacgttactacactgtccaaactgtaacacctgtggtaaatgcccagggtaaaaaagttgacgaaatcaagtcaaagaataccaggacaaagaattatgtccaaacttatggcaccaagaggatcaaaggctatgattacattaagataggtagtaatcgctataccaatatgttgggatttgaatatgttttagcgaagtagggttcgattgattatttagtttatgttaaaagaagcactgtgttggtgcttctttttttgtacctacactacttgttattaaatggggcttcggggtagaataaaactatatttactttaatatttagaggaaaaacaatgtctaactttgaaacttcacaaaaagattatcaagaatacgcaaaattggcttccagcgctgaaagcttaatttactctgatcctagaagtagtttgacagttttcggaacttttggtgagcaattaactaaggaaatcatgcatttggatgatttaggtgattgggaattaaaccaaaaacaacgaattgaaaaaatggcatattctaagaatgaatatccacctactgttttgaatgctcttaatttgatcaggttaagacggaacaaggcaacgcatgacgatcattttattgctacccaaaagattgcgcttgaaattgatcagagtgcttatttggtatggaaatggtttttagaagtttattctctggataaagttgcagattatgttgagccacaagatcaaaaagctttaattaaaactcaagaagataaaatcaaagctctcgaagaaaagataaagcaattacaacaaaatagggtgcaggaagtcataatttctcctgaagagcgtgaacgcagacgccagattaacgttcaatttgctaaaaaacatgagttaactgaagcagaaacacgtcagttaattgatcaacaattgcgagatgcgggctgggaagtagattcacaaaaattgaacaattggacgcagaaaactgaaccgcaaaaaggtcacaatatggcaattgctgaatgggttctacctaatggtcagcgagcagattatgcattattcaaaggtttggagttctacggaattgttgaggccaaaaagtgggaccaagatattgtagggcaaatggcacagcctaaggaatattctaaagaggtaccgtttagatcagattatcgtctagtttcaaatgaaatgggtgattacaaagttccattcatctatactgcaaatggtcgtccatatcttaaacaatatcaggaaaaatctggtatttggttctgggatgcacgtaatcataaagaaagcgcatatgctctagaggaatttcataagccagaagatttatcgttgaagctttctgctaaaaataaagaagaagcaaatcaagacttggtagatgatcaagattttcctgattttgcacatcgtgaatatcaaattgctgcaattcaagcgatggaaaatgccatcaaagatggaaaaaagcgtattctgcttgccatggcaacaggtactggtaaaactagaacggcaattgctttgatgtacagactacttaagcataagagagctagacgtattctttacctagttgaccgtaattcattgggaaagcagactgccaatgcaattaaagataataaaataggtacgatgtcaatttcttccatttatggattaaaggaattgagtgataaggcacctgaaatatcaacaaaaattcaaattgcaacggttcaggggatgatcaaacgcctatttttcagtgaagacagtgatgataagccatccgttggtcaatatgatttcattattgttgatgaagcccaccgtggttatgcagaagataaagagctcagcgataaagaatatcaattctatagtcaagaagattatgttagtcaatatagacgtgtagttgattattttgatgcgactgctattggaatgactgctacgccagctttacaaacgattgatatttttggcaaaccggtgtattcgtatagctaccaacaagctgtcctcgatggctggttagtggatcatgatgcaccagtaattattcaaactcaattgtctcaagaagggattcattttaaaaagggtgccgaagttagtctttttgatcaggatgaaaaaactatcaataaagaaaaattacctgataatatgaattttgatgtaaaagactttaataagagagttatcacacgtagctttaatgaagtagtttgtgatgaattagctcaaagatatcttgatccaaatgatccaaatttaggtaaaactttaatctttgcggcaactgatgaacacgctgatatggttgttgacttattgaaaaaagcattcaaaaaagtgagtaatcctgtagatgacgatgctatcgaaaaaattactggttcaattcggcatcctaatcaagaaattaaaaactttaagaatgaaaccaaccccaatattgcagtaactgtagatttactaactacgggaattgatgtaccgcaaattactagtattgtcttcttaagaagagttcagtcaagaatcctctatgagcaaatgttgggacgggcaaccagactttgtcccgaaattaataaatccaaatttacgatttatgatgccgtcggaatctatgaagcaatgaataaagtgacaaacatgaagcctgttgttaaaaatccaggacataatgttcactacttcttaaatcacaaggatgatttctttgagacaaatgaggattccgctcagtatcaagtagatatggctggtgccgttgagagaaaaattaaacgtttggatgatactaaacgtgatgagttccaacatctagctgagattaattcggttgatcaatgggcccgtgaattaagtaagttagataagtcccaatttttaaagcaatggcctaagtttgagcagttagatcacatcaaacctgtcaaacccaagcaaataatatcagacgcagtagacaaagtaattaatgtaagtcgaggttatgggcatggcaatcaaaaaccagcggattatattgaaaacttcaataaattcgttaaggaaaacgtcaatactattccagccttacaagttgtagctactagaccgaaggatttaacttttgatgaactcaaaaatattaaacttaagctagagcaaaatggctttaaagaaaatgatttgcaaagtgcatggaaaaacgttaaccatgttcagaccactgccgatattattagcttcattagacaagctgcggctggatctgagttggtggatcatgatgttagaattcataatgccatgcaaaaagtttatggtttagctgattggactattcctcaaaagaaatggttgaagagaattgagaaccaattaatttcatctactgtattggggccaaatgctgagaaagcctttgatgataactatttctttaaacgtcacgggggttataagcaaattaagaagatctttccagaaaatgctgatcagattatttacgtgttgaatgagaatttatatgtttaaaaatgccattactggtattttttgcttttaatcacgaaaagttgtgataaaaaaaggcgtgtgctaaacttaaattaacacggaggaatacaatatgttaatcgagttcactgttaaaaattatgcttcttttagagagcgcactaccttgtctgcagagacaggcaatagactacgtaaattgaaagaaactaatactttctcaagtaaaaatccatcattattaaaaagcttactgttatttggtccaaacggttcaggtaagtctcaattgattcaagctttacaaacaatggaaggaatagtaacacgtccaactcaagccgtaactgataagttaaattattatccttttttgtttgatgaaaagtccaagattgaagatacttactttgaagtgaagcttgagttaaaaaacaaaatttatgactattcatttagttacaatcgagagagcattaccagtgaagcattaaccttaattagtggtaacaaggaaaaagaaattttttctcgaaatggaaatgacattcaagtctctaacaagcttttggaagacagcattcctaagcttagagataattctttattcctatatttagcacaatctgaaaatgatgcagattgtattgctatctataagtggtttgttaatgatctgatttttattggcagcggctatccagtaaatattcctgacgaacttttaaatttgatggaagatgaatacctcaaaaaagaaatgatctcattcttaagttttgcggattttaatatctctgatattagaattagagaagtacctactaatccgttgaatccacaattacaaaagattgtagagaatttaaatattgattatcctaaaacaactaaagaactatatacggttcacaagatttatcatcaaaatgaagttattaattctggggaacttccattaacacaagagtctgttggtacacgtcgtttattttatatagtattagcaatgatgcttgctcaaatgaatggtaacgagaagacgattgtaatcgatgaatttgatgattcactgcatgttgaacttgcagctgctttagttcgtatttttaattcaacagaaaatttgaatcagtttattatcactactcatgatattcagctattagacagcgatttaagaattgatcaaatttatttattagacaaggattttcacggaattagtgatttgaaatcaatctttgactttgaagatgcacgtaataaaggtcgacatgatatttcgtttgctaagagatacttacaaggccgattcggtgcagttcctgtaatagatgtagatggtttgctagatgtattgcaaatgattcatgaaaaatatggggatgagcatgggaagaataagaaataagactaagtctaatccaattattggaattctgtgtgaaggtgaatctgaaaaacaatattttactatgcttaagcagaaatatcgtttagcaaatattaaagttaaaatagttgctgcagatttgtctggtaaaagtctagtagaaaaagcagttaagtttggcaaatataatcatttagataaaacttatgttgttttcgatagagatgagcattctaaagatgaattaaggaaatgcgctaaacttgctcgaaaaaatgatattactattatgttttcttcaatagactttgaaatttggattttaatgcattttgaaagtgtcactcgttcttatactagaaaagagctagtacagaaactgtctagatctgcctattttaatcaagattatagtcgctttaaaggtaatagttatcgagaatatatttttgataaagtgcaagatgcagtagatcacgccaataagttgtatcggaaaaagagtgactggattaatgatgatccatttactaatattcaaatatatctaccggaaatcttcaaaagagacaatttttaaaggagcaaaattaagtgaacaatcaagaaatcgttcaaaagttatggaatgaatgtaatattttgcgtgatgatggtgtcagttaccaagattacattactgaattaacttatatcttattcttaaaaatgagtaaggaacaaggtgaacaggatgatatcccccaaaaatatcaatgggataatcttgtttcaaaggaaggactagagttaagtaacttttatcgccaattattacttgatttaggtaatcctgaagtggttaatagtccaagaatcaattcaatttacgctgatgcttctacttcaattcacaaacctgctgacctggaaaaaataataaaagatattgacgcacttgattggtggtcagctcgtgacgaaggccttggtgatttgtatgaaggtctaatggagaaaaacgccagcgaagtcaaatctggagcaggtcagtattttaccccacgtgtgttgattaacatgatggttagaatgactcagcctaaaattggagatcgctgtaatgaccctgctgctggtacttttggctttatggtagcagctgacagatatttaaaagatcaaacagatgattattcaaccttgtccgcagataaagaagaatttcaagtaaaagaagctttttctggtatggaattagttgaaaccacgcaccgtttagccatgatgaatgagtatcttcatggcatggatggacgattggaactaggggattcattatcttcaaatggtaaatggatgaaagattttgatgtagttttaactaatccgccatttggtaccaagaagggtagtgacgacagtgtaagtcgtgacgacctaacttataagactagtaataaacaattgaacttcctgcagattatctacaattcacttaaacacaatggtaaagctagagcagccgtagttgtgccagataatgtattgtttgccgatggtgttggcgaagcaattagaaaagacttgctcaacaagtgcaacttgcacactatcttgagattgcctactgggattttctacgctcaaggtgtgcagaccaatgtattattctttactcgcggtgaaagtgacaaggataataccaaggaaacttggatttatgatatgcgtcatcagatgcggtcatttggtaagcgtaatccattaagtgacaaggattttgcggaatttgaaaaactattctgcgttgacgatcgctcaaagagaaaagaaacttgggataaagagaagaattctaacggtagatggcgcaagtttacgattgatgaaattttgaagcgtcctaatactagccttgatatttcttggatgaatgatgaagaagagcacgataaccgttcgttgaaagaaatcttagatgagatgaatgacaagtctaaggcaattagggatgcaattgcggaacttaataaggcgttagaaggaattgacgatgaagactaatactttagattttgatgcacaggctttaagagaaaaaatcttggatttggccatgcacggaaagctggtgccacaagatcctaatgatgaaccagctagtgtattgcttgagaagattaaagctgaaaaagagcagttgattaaggaaaagaaaattaagaaaagtaagccgcttgctccgattactgatgatgagaagccttttgatattcctgatagttgggaatgggttagattgggggatgtaggtttactaaaaaatggaaaaactcccaagaaagaagacataagtagtgataatatttatccatactttaaggttaaagatatgaataataataacttatatatggaaaacgtgaaaaattgggttggagaaaaatatagccgacaagtaatgcctaaaaatacaattatttttcctaaaaacggtggagctatattaaccgcaaaaaaaagaattttgtctcaagattcattggttgatcttaatactgggggattaataccatacaatgacttaaatcacaagttcatattctatctgtttttaagcttggacataaaagactttgtaaaaggatctgctgtaccaacaattaattcaaaaaagttgaaagaaactcttgttccacttccaccacttgaagagcaaagtcgaatcgctgctaaaatagcgcagctattcgctttgcttcgcaaagtcgaatcgctgctaaaatagcgcagctattcgctttgcttcgcaaagtcgaatcttctactcaacaatacgcaaaacttcagactttgctgaagtcgaaggtgctggatttggcaatgcgtggaaaattagtcgagcaagatccccatgatgaaccagctagtgttttgctagagaagattaaggctgagaagcggaagatgatcaaggaaaaggagatcaagaagagcaagccgttgcctccgatcactgatgaggaaaagccgtttgatattcctgatagttgggaatgggttagattggggaatattgcaaaaaggattactgatggtacgcataatcccccaccgaattcacatgaaggaaaacaagttatctctgcaataaacattaaaaaaggaaaaatagatttttctttatcaaatagatttgtttctgaagatcaatttttaaaagaggataaaagaacaaacatccgaaagggagatgtattactcactattgtaggctcgttaggtaatgctgcagttgttgatactgataaactttttacagctcaaagaagtgttgcggttattagtagtaatattttaagtaagtttctttattatgttttaatttcagcaatgtttaaaactcaaatttttgctaatgcgaaagggacaacccaaaaaggaatatatttgagtaaattaattaatttgaaattacctcttccaccattagcggagcagaatagaattgttgataaaattgacaatttgtttatatattagaattaacttttaagagatgaatttatataatacgaggagattaagtatgcagttgtacagagataaagaaatagatatagagttatcgttacctgataaatataataaacaagataaaaagaaagcactaagtaaattttatagagataaaataaatccagatgatgataatgatcatgattttgtgtttttagaaaagcaacttcataagtttctcaaaagggctgttttgcgttttataagtaaagattatagtaatgttgtgctattagttggtgccggagcttcagttgtaactaatgagaatggaaatattaattcaaattatggaaagactatgcaagatatttcatggaatattttcaatcagctttatggaacaaataatttagaagaatatttagatgaaaaggatgctaagatctttttacctaaagatcaacaagaaaaatttgaaaaagttaattttgatgatgaaagtacatggttttcttttccattagaagaatatatttcaaatttaaatttatatattcaagacgcagagatgtctggtaaaaaagtcagaaatccaagtttatcacaagcaaaaaaattaaaaagatttattttactatcaatacttgattcagttgattataatttcgatagtacatctaaaatgccatttaagcatgataaagtgattttaaagttgcttaatttaattcattcggatagcagtaaattgatggttgcgactacaaattatgatttagcaattgaaaaatctctggaaaaagataacttcacaatatttgatggatttgaatttggaaataataaagaattcaatgatgatatgtatgagtgggttttgagtaaagaagttaacaatattaatactaaacaagttatctataaaaagcatgttatagatcttcttaaaattcatgggtctattaattggattgaaaaagaaaataaagttactaaatcgactgtggaagaggtaaaaagtacgattagagataacagtaatcatgtaaaaatgatttttccaagttctaataaatatgctcagagctatgaggaaccctattttgatctcatgtctcgatttcaaaataagttgcaccaacctaatacattattagttacttcgggttttagttttggtgataatcacataagtagaatgattataaacgcaattaagcataactcaagtttagattgtttgattactgattataatattcataattttgataaaaaaacagaacaagaagatgttaatgacaactggagtgatttagatgatttgagagatcgaggatataatattgcttttcttaaagcaacaatgtgtagttataattatgatttatcttattatgtgggataactatgagtttgatagataacttttttgatagttcagacaaaaatttgcatgtagacaaatgtgaatactatttaggtaaaatatctactgtatcttctatttttgctaatattcaaatagaaaacatgagtttattgaagtatcgcttcaatcaaagtgatgttttacgccctaatactattaattatcatgttttgattgatagtaatggcacaattttcgaaactgtcaaatcttttgtgtaaatagttctttctcgtaaattgattttttaattatttatttaatcaaagtaggattctaaggtgtcctgaacctgaccaaagcctttatgaattcgattgaaataacggtcattgtagctcattgcctgaatgccaataaaagcatcaagcgactgttcagttggaaactctgccttaggcttagctttgcgcttgatcacattgttaaatgattcaatcatgttagtcgaataaattgaagctctgatctgcttgggatagttataaaagaccagcagatctggttctatgtctttcaagcttctgataacatggctgtaaaccttgccccatttggtatagaagtcatgcaggacagctgtggcttcttctttgtttgtctgttgatgcacctgtttgaattcgttcatgatcttttcacgatcgtcgacgcgtactttagcgcagatattgcgcatgacatgaaccaaacagcgttgaaaatgagctttaggataagtcctggccaaggctgttttcatgccaacaacaccatcagaaagaaaaagctcaacttgctttaagcctcgggatttcatgttttgaagcatatctgtccagacttcaatgttctcgctaggcgcaatgcagtagtcaatgacctccttgtgcccattaggcttgatgccaatggcaatatagactgcttcacgctcaaatgtttctcggcgcaaaggaaggtatgtcgcatccaaatagacgcagaaaaacttgtcgcttagcttgcgtttgtggtaagcctcaacctttggaatcatctgcttggaaatatttgatacctgagctggactgtaatggctgccatacatcttttcaattagatcggctatttccctggtggtcacgcccttggagtaaagcttgataatcatgctttccaagatatccgagtgctgcttgtagccaggcagcgtgtgctgatgaaattgaccgttgcgatcccgaggcacttgcacttcaattgggccaaattgcgtatcaactttgcggaaataagcaccatttctagagttgccagtattccagccatttctggcatagggatcatagcccagaaaggcggtcaattcagcttctaacaagttattaacagcctgttgtagctctttgcgcaataaatcatttattttgtctggattgaatagagcttgagcaaaatctttggtaaaatcattcatgaaggagttcttctttctgtatgtgtttttttgttcaaaccaatcatacgagaaaggaactcctttttctaatgtttaaagaaataaatttaaggaatcattcatccttacacaaactattttacagtctccaattttcttagggaaagtaataagttctaggattaataatactgataatattcataaggcagtaatagaaaataatgatgatattatttacccaaatattgaaattaaactaatggcaatgtacgataaaaatacgtttgtattgcccggagatctaacagtaggaattggtgataaggcatatatctgtaatgatgaagctattaagaaatatataaattcattagaaattaataaaagggataatcaaattgaattttcaagctttaatttaaatgaaaagaaagctattccattcaaaattagtgttgatggattatttaatcaccattttatgattgtaggagcaacgaattctggtaaatcaactagtgcattagcgattttagataaatatcaaaagctaaaaggaaaatttttgattatagatccaactggtgaatataaagatgcattttcaaaaaatgaggttaatttaaaaacaatagggaaaaatttattcttgaatactgctaatttgactgatgaacaatggatttctttatttaggccaaatgataattcccaagtgattgagcttttagaggcaataaaaaaattaaaatttgttcaatactataaaaagcatttaaataaggtaaatttaaccgaggcagagaatagatttataagaaatgatattcttgactgtgaaggggcaaatcaagaacagtacaagcatcttcagattcagtgggaatctgataaagtttttaatgaatcatttgatataaacaatttagataaacaaattgagaaagattctttaaaacttagttggaataaaggtataaaacaaggaacctaccagtttgattattttacatatggagctaattcttggctaatacgtaaagtaaaatatttgattaagacgtataatctaaaagagttatttttaaacgtagatagtaaaactcaagataaggattttggagaaacagataaaggtaaaaagatactcaaagaccttaataaagaaatgttagaatttcaaggtaatgacatatcattatatatacgtttaaatgattccaaattttcaattggattaggacaagtaattgtagactatataagtaatttcttattaaatcatgatatgacaaaacatccaactttattatttgttgatgaagttcacagatatgctttagaaaaagatgctcaagatgattttatttctcctctggctacgttagcacgagaaggaagaaaaaatggaatatttctatttttaactactcaaagccccaaagatgtgccaactatagtattaaatcagataggaacacttttaatgcatcggttaactggtgaatatgaaattaaagcaatcaataatttcctaaataaagacaaattagctcagttgtcgagtttaaagtcaggagaggcaatattgactagcgtaaatttgatgcaaccagtcaatcttaatataaaagcttctgggcgaacacattacagtaatacgcctaagttgataaagataaaaaatgattgactacaaaactttaaaacatagtgaaaatgggatgccaacttgggatgcatttttaggtcccatgctagaggtagcgagtactaaagaagaatgggtaggtagagagcttgataagctgttgtcacagagattaatttacctgaagaacttgttaatttaagatatccttctaaatatcatgatttagtagcaattagtcgagtagcttgggcgcttagtgatttaaaattagctggtttactaatctcaccaagaagaagtatttataaaattagtgatactgaaaaactgctattaaataaatatggtctaaacatcactcgtgaattagtacattctcaaccagcatatattgagcaccagaagaagtttcaagagaaaagcactactgatgaagaagtcttagaagagcagacttttgaattagccgaagaaaagaagaagaaggatgagtacgataagctaagctccgaacttaaagatgctaaggataaaaaagaagaacaagagaaggagcaaaaagaacaggcaaaagcagctgctaaaaaagctactcaaatagcaaaacaatcacggcaaaacgagtcagctcaatctagtcgttcaactgcaacacatcattctaatggtggcggcaatcatggagacctagatacagcagaaactggcaaaattgtcggtaacgtcaattctaagatttatcacgtaccaggacaagcaggctatcatatgaattccgcaaatgcggtttacttcaatagtgagcaggatgcaatcaatgctggttacagaaaggcaaaaaggtgatgaataagaagaaaattattacacttgtttcaagtacgttgtttttgtttggcggctatggtgcgattactaatcctagtctaagtcaaaatgtcatcgccaaggttaaaactatcatcaaatatgaccacagtgctgagaaaaagaccaagcaaattgcgcaggaaaacaagcaaactgaaaagaaaattgttagcctagacaaaaagattgctaaactgcgcaaagaactcaagaagtacactggcaaacacaatattgaatctgttagtgccgcaaaactggcaagtcttaactattctgggaaaaacatcattacagtaaataacaacgatcctagtttttctaagagtgacttgagtactaatcgcggagcatggcaagaatatggtaacctcgatggtttgaatcgggtaactgccgcaaacgcattgcttattcagtcgctgatgccaagcgctagacgcgaaccactacatgttgatcctactggttggcataataaacgagttgctggcggctggctctataatcgctgccatttgattggttatcagctaacaggacagaacaacaacattaaaaatttgatgacaggtacaaggcagctaaatgatcctgatatgttgcgctatgaggatcaggttgctgattatgtaaaagaaagtcgaagcaactacgtccgctaccgtgtgacaccggtctttcgtggcaatgaactattggctcgcggagttgaaatggaagggcagtcggttaactcaaatgcagttcatttcaatatttacattttcaacgtgcaagatggcgtaactttgaattatgctaatggtactagtcgagtagggtagtagaaatgagatacccttattgataagaagatgactgagattaatttctcggtcattttttattaatgatatttccttagaaacaataatattgattctattaaacaacgtttttcaattcgtaaaataacaatcggtgcagtttctgtactaattggattgacttttatgagttactctagtcaaacagtacatgctgatagtgttgatgcaaattcatctgatagtgctactaccagtgttataaaggaccaaactactacagagcaagttgcttccacaactaaaacttctaataatgtagatacaaatggtgccaataaaactgaagacactactagtattgtgaagacaaaatcgactaacaaagttgatctttcaaatactgatttaactactaagaacaattcaatcgatgataactcaaatgtcggatcatcaattgaaagtaagaacaagatagctactaatgaaaacaagcaggagagtacgacttctaccaataagcaagctactacagtagcttcaactagtaagacacaagctaacaccactcaaaatagtcagtacaacactgcagattgggatggaagtttagatcaaaattctcatcaatacactttaactaaatataagggtactggtaataaaaatatttacatccctaatacccaagattttatcaatgcaggaacaataactactgatgataaagtctatatcactaaagacttattagaaactatcaaagatgcaggtgcagttaacattactattgacagtgagggagataagaacaaagtttatgctaagggtgacatgaccgcagccttaatgaacagtgacactttaaagtctgctgatctaagtcatttagatgttagtgaagccactgcaattagatctatgtttcaaaatgacaagaatcttgaaaatgtaaacatcgctggctggaatatgggtcaattcagtgacgtgtcacaaatgtttagtggcgctgaaaagcttgtgaaagttgatctaagcgatactgtatacaaaaatgtggtaaacgcttggaacttttttgcacataataatgccttaactgatgttgatctaacaaatgcccgcaacattactagagaaatagttaatggatacgttcaagcaataaagaaccaaatgcaactgccattgatttaactactacaactttgaattccaatgtaactaatctgaaacttttattttctagtattccaaatgtaaaaagtattaacttaagtggttgggatacaagtcgtgttactaatatttatgcaacatttggtcatgataaaagtcttgaatctgtaaatattagtggttggaatttatctaatgctaaatcgattgctagtttgttcgatggcgatagtaatttatccaatattgacctaagcaatgtaaactttggtaataatattggtgataatggtgattccttcggccatgttggtaataaattaagtaacgtaaatttgactaatgctaaaggaattcccgaagcagtattgagagcatggggtcaagcagcgaaaaataccaaggctactgagctttcaatgagtacatttactgtttcaaccgacagttgatttagactttaatcttcacggtcaaaaacctggcatcgattcaagcaatataaaggttagagacgaaatagcagtagtaaagtaaataaatgtgatagaggattggacttatatttaattgctgtaagttcaaccctcttattttgattaaatctttgatacaatagacatgattaaataaatagggtgtgatctaaattctaaaatctaaacggcatttcatgtttctaggagttgcaggaattatctattattcttggctcttaatcgttctatttatcgcctttattttgggctatgaagggaacaaagcaattagtatacctggaatagtagttggtatcattttcttacttttagcagtttatacttggtccttttcttacttgcaaaagggtggagacaaaatattactcaagttgccatatcgttcaaaagtaaaaatcaatcaaatgactttgctttcaagttggcgtaattttcaagtttatcaactaaaaagtgattaccaaagctattctgttttaatgatgtctagaaagaagaataagcaataatgaaatcagatattgaaatcgcacaagaaaccaaagaattacctattaatgaaatagccgctaaggtaggcttgaaagaggaagacttagaaccttatggtcatgataaggctaagattacttggcaagccattaacaggactcgtgctagtaaaaagttaggtaaattagtattagtaacgtcaatttctcctactcccgctggggaaggtaagtcaacgattacaattggcttgggggatgcaattcacaatcagttgcaccagaatacgatgatcgccttgcgtgaaccttcgatgggacctgtttttggattaaaaggcggtgctacaggtggtgggaaagcacaaatcatccctatggaagatatcaacctacacttcacaggagatatgcatgctttaactgccgcaattgacacacttgcagctttagttgataactacatctaccaagacaatagcctaaatcttgatcctgaccgaattttacttaagcgtgggcttgatgttaatgaccgtgctttaagaaaaatcacggttggtcaaggctccaagtttaatggtgttgaacatcaagctagttttgccattactgtagccaacgaattgatggcgattctctgcttggcaactgatattaacgatttaaagagtagaatcggtgacatgctagttggttacactaaggatgatgaaccggtttatgttaaacagttaggattccaaggtgcaattgctgcactattgtctaatgcgctgaagcctaacttagtacagaccttggaacacacaccagcattagtgcacggggggccttttgctaatatcgcgcatggagccaattccgtcattgcgacaaacttggctttgcatttaagcgactatgtattaactgaggccggctttggtagtgatcttggtgggcaaaagttcatggactttgtctcaagacatctggacaagacgcccgatgctgcagtagttgtagcaactgttcgtgcattgaagtatcaagctttaggctcaactgatcacttagatgaagaaaacctagatgctttaaaagaaggttttaaaaacctcgagcgtcatatgaacaacatgcgttcatacaatgtgccggtcatcgtgttaatcaatcgttttgcttcagatactgaccaagaacttgctttgcttaaacaattaattgaagaacaaggtattaatgctgaagtagttacttatcatggcgaaggttctaagggtggtgtagaagccgctcaagctgttgttgatttggctaactctggcaaggcagatttaactccaacttatgcagatgatgacgatgttaaagacaagattgagaaagtcgctaccaagatttatcatgcagctggagttgaatatagtgacaaggctgaaaagcaaattgcggaattaagaaagttaggtaaggcccaattaccagtaattattgccaagacccaatattcatttagcgacaacaagaacgaattgggtgctccaactgactttaagcttcatgtgaaagggattagtttaaaaaatggtgcgcattttatcgtggttaccacaggtcatgtgctagatatgccaggtttgcctaagcatcctgcggccctagatatcgatgttgataacaatggtaaaattagcggattattctaaaaagatatgcagtttttatatttaattatttcattagttgtggttcttgccgatcaaggacttaagaattatattgttgcccattatgctgtgggagaagtacaccagattattcctgggcttctttcctttaattatttgcaaaataatggtgcggcctggaacattttaactggtcaaatgtggcttttttacattatcagtattattgccattagtgtttgcttgtattttctttttaacaaaaagtacaagaataccttgtttgatgtgggtttagccctcatcttaggtggaattgttggtaattttattgatcgtttgcatttaaaatatgtagttgatatgcttcagcttgattttgttcacttcaacatttttaatattgcggattccgcaattactgttggagtaatccttgtgttcatttacttaatttttattgaaggtaaggaagaacaacatgactaaagaatattcacttgaagtaaaaaacgaaaagggacgtttagataagtttgttgcagaacaaattcctgatctatctcgaactagagttaaagaactggttaaagaccaaaatatcctagttaatggcaaagtcgaaaaagtatcttataagattcaggcgggagataaaatcgaagttaatattccagcggttaaaccgttagatgttatacccgaaaatattccacttgatatcgtgtatgaagacgatgatgtcattgtagttaacaagcctcaaggtatggtagtgcatcccgcaccaggtcatccagatcatactttagtaaatgcgttgttatatcacaccaaggccttagcacaatcaccagaaggatttcgtcctggaattgtccaccggattgataaagatacatctggtttattaatgatcgctaagaccgccaaggctcgtgaatcattagaagatcaattggctcataagactaacaaacgtctttattgggcaattgttcatggtaattttgcggaagaaaatggggtaattgatgcaccaattggtcgcaatccatatgaccgcaagaaaatggcggtagttgaaacaggcaaaaaagctattactcacttcaaggtgcttgagcagttcaaggattatagcttaattgagtgtcagcttgaaactggaagaacccatcaaattagagttcatcttgactatattggacatccggttgcaggagacccattatacggtccacgtaaaaccttgaaaggtcatggtcaatttttgcatgctaaagtattaggatttaaacatccaagtactggcgaatggctagagtttagtgtagaaccaccacaaatttttcaagaaacgttggctcaactagaacaaacaagtaagtgataatatgaaacggtatttgattttagaagatggcagttcatttccaggtgaaggaattggtgccagtattatttcaaccggtgaattagcaattcaaacggctaattttggctaccaagaagcattaacagatcctactaatgctggtaaaattttagtctttacttcaccaatgattggtaataacggtattaatgccattgattatgaaagtattgatcccgtagttaaagggattattgctaacgatattgcattaaatatttcagatagtgaaaattttgaagatttaagttcttttttgaaagaaaagaacatccctgcaattttcaaagttgacactcgtgctttagttcatcgcttaatggaagaaggtacaattaaagcttcgatcatggatactaatgacgagcatgcctttgatcagattaaagcactagttttacctaaaaataaatctgcgactgtttcaactaagaatgcatatgcatcccctaatgttggacgaactgtagctgtgctagatcttgggctaaagcactcaatgctgcgtgctttatctttacgaaaagtaaatacgacagttttaccatacagtgccagtccgattgatattgaaaacttacgtcctgaaggaatgattatttcaaatgggccaggaaaaccagaagaagtaattaatcagctaacgccagttttagatcatttttatggtaagtatccaattttaggaatcggattaggttttttaactttgagcgattatctcggctttgaactggttcaattaccacaagaatttgatggtattaattatccagtgattgaacaaaatagtaatgctatctggcaaacagcgatgaatattgaccaactagtgttgcctgatagtgtgaagatgaatatgaatcgtgaatactttgatctacacagtgaactgatggcgggcttctggaacagtaaggacaaattgatcgccactgcttttaatcctgaaggagcaccaggcactaatgatgcagatgaaatttttgattattttttacagatgatggggtagttatatgccattagaaaacgatttagataaagttttaattatcggatcaggccctactttaatcggtagtgtagcagaaatggatcttatggcaacagaagcaattgatgctttgacagaagaaggcattcaagttgtgctagtcaatcctaatccagctacaatttcaactgataaaaaacttggtgtaacagtctatcttgaaccgatgactctcgacttcctgaaaagaattctacggatggaagagccagatgcaattatgacagcttatggttcaactaatggtttaaaggttgcacataagttattacaagatggcgttttagaacaaatgggaattcagttactaacattgaattcgcgtgctctacaaatggggaatcaacagaaaaagacagagttgcttactaagctacatattgataccgggcaatcttgggaacttaatcagagtattcaggataatttagataatgcgctagaaagcattaacgacaaagtcacttttcccgtattagttactaagtacaaccgttttgtacacaacgaacatttgcaatttgcaaatcctaccgatttaatcagttactttaaagaagaaaagcaaaatgataattttacatggaagaattatcgcttaactgaagacttatctagttgggaagaagtaattgttgacgtaatccgtgataaggatggcaatttagcttttatcaattttgcgggatctattgaagctgtaggtattaattcaggtgactctgcagttgtgatgccatcattaaccctaaacaatgatcatattcaagagttaagaataaccgttagaaaaatcatgtctaatcttgatctcattggatttgctagttttcattttgcgattaaacaccatggaactcaaattcgatctaagcttttgacgattcgtccgcgtttgacgcgaagttctgtttgggctcaaagaattggaatgtatgatgtgggatatgtcgttagcaaagttgctatcggttatcgactgaatgagattaccgatcctctatctggacttaatgcctcaattgaacccaccttagatgcagtagcaattaaaatgccatattggtcatttgctgaatccggctataaccactatttgctaggaagtcgcatgcaagcaagtggagaagcaatgggtgtaggccgtaattttgaaactgcttttctgaaaggcttagatgcaactattaatttagaattgggttggcatgcttttataaaagaaaaagaaaaatccactgcagatattttgaatgatttggcacatcctgatgaattgcatttagttaaattattagccgcaattgatcaagatattccatattctgaattacaaaaagtaacacatttgcatccggtttattatcagaaattgcttcacattgtaagacttggcaaaaagttattacaagagaaggagcagccttcgcgtgatttgctgcaagaagctaaagtctatggattctttaacccattattagctaagattttacaaaaatcagttactgaagttcgctctttgattaataaaattgacttgcagccatcatatttgaagatcgacggctcagcaggtatatataaacctaatgtttgtgcttactacagtgcatatgatgttcaaaatgaagcacaagctttaaatgctgaaaaaaagatcttgattttgggcatgttgccgcttcaagtttcggttactagcgagtttgactatatgattgctcacgcggccgatactttacataagtatggctatgttactgtgcttctatcaaataatgacgaatcgatttcatcaaggtataagaatattgaccgagtttattttgattccattacagttgaaaatattctaactgttgctaaaagagaaaatatttctgatgtattagttcaattttctggcaaaagaatcagtgcattgagtaaagagttggaaaaatgtggtttgcacgttattgggcaaaaggcaaacgacgatccgcgggataagattactactttgcttgatcaacaatctactaccttaaagcgggtcccggcattaaataaaacaactgatacagaccaggttttcgcttttgcttctaaatatggttttccacttttaattggtggtatgaataaagaaaacaagcaaaaatctgcagttgtttatgatgttcctgcaatagagaaatatttagcagaaaatcatcttgatcaaataactatttctcgctttattgagggacacaaatatgaggtaacggctatctctgatggtaccaatgtaactttgcccggtataattgaacatctagagcaaacaggttcgcatgcctctgattcaattgcagtgattcagccgcaaaatttaaccgaagagcagcaaaaaaagattgagcaagagtcaattaaattaattaagcagctgaaaacaaaaggtatttttaatctgcactatttattcgttgataatgacctatatctattgcaaattaaaccatatgcaggtcataatgtagcatttttatcaaaatcactagataaggatatcactacttgtgctacagaagctttaattggcaaaaatttagcagagctaggatatcctaatggtctatggcaaaacagcgattttattcatattaaaatgccagtattttcatttcttaattattcaagtggtaatactttcgattcaaatatgaaatcctcaggttctgtaatgggtcgagatactcaactagctaaggctttatacaaaggatatgaagcaagtgatttacatattccaagttatggaacaatctttatttcagtcagagatgaagacaagaatcgcgtgacccaactagctcgccgatttgatcgcttgggtttcaaattaattgcgaccgaaggaacagctaatatgtttgcggaagctgggattactactggagtagtggagaaggttcataaagaccctagaaatctactagataaaattcgtcaacataagatcgtcatggttgttaatattactaatttgtctgatgcagctagcgaagatgcatcgcgcatcagagatgaagcgctgaatacacatattcctgttttctcaagtatcgaaacagcggaattgattttagacgttctagaatcattggctttaactactcaacctatttaataagcaaaacaaaatgcaaagtcgatatgactttgcatttatgagaatcattgaactaactagttcgatgatttttatttttcaatttttttattcataatttccttttcttcaggagttacttcaattgaattttgtccagtgtagattacaaatcctggtttagcaccattaggctttttcacacgcttgtcttgcacataatcaacttgtacgtgagcggaatttttagccttagaaaagtaagctgcaatctcagccgcttctttaatatcttgatcagtaggctgatcatcgcgtaagatcacatgtgagcctggcatattcttaacatgaaaccagtaatcagatttattagcttttttaagagtaagccaatcgttttgatagttgtttttaccaaccaatacgtgtttaccagatgaaagtttaaattcatttaaattgcgttcaatgattttcttcctacgcttatttttcttttgtttacgtaaatatccttgattaatcaattcatctgtaatttgatcaatatcctgtggatccgcattgtcaatagctgtttgaattgaatccaagtaacgaatatcatccttagcaatacgaagctgttcattaatgtgcttaatagaatcacgtaactttttgtaacgagtaaaatacttttgcgcattacgagcaggggagagagcaggatctaatttaatctctaatggagcattattttcgtaatagttaggtaatgaaactttagtcattccaggttttacttgagccaaatttgcatttaaaatttcgcctttaattctatagccctctgaattttcagcaagatctaattgcttctcaagttttttaactttcttagttagtttattttgctcattcttaactacacgttcaacttgtcctgcacgctgcttaacccaatcacgtgttgcctgatattcataaaattcatctaagccagcattcagatctggattagagctttctttctctaaatctaaatgatagggcaaataacaaaaaatcttacgcttatttctaggtgtttttaaaataaaagcacgcggattgtcaaactgattaaaaaaggtcttaaaagatgaataagtgtaatcgtcttcaagatagcctaataattcagttcgatcatctttatctaagccatccattttttgagcaatttcattaggctggttttcactacttaattgtttaaattcactttctgatagagtcaacccatttaatcctggttttagtgggggcaactcatattttgcttttggcagtaaaacacgcgctctattttcatcaggattaattcgcttaagtaaatcaataatgtgattgtcttcttgattataaaggatgacattactatgacgtcccattaattctacagaaagcatgagcttgacttgatcaccaagttcatttcgattactaaaatgaaagttgacaattcgacctaagccaacttgctcaatcgattgcaaaactgaaccttctaagtattttcttaaaaccatgacaaaaataggtgctttatcaggatttgcaatgttttgtttagtcaaatacattcttggatattgtgcattggccgaaattaaaaattgataattctttctatcttttctaaaaattaagactagatcttgatcaaatggttgataaatttttgataagcgaccacctaccagagtagggactaagtcttttaataaactatggataaataatccatcaaatgccataaatatcacctcaaagttcgtgtaatattatatcaatttttagtcagattctaaaatgattatatttataagttatagctaatcataattgaaacctgcaatacagtagtaaatgtttcacgcgaggtctgctatatcattaagttgtatattacaacataaaaagtgcattgtattatacaatattactgataaattagccttttggtattatcaaatgccatattaaatgataaaatacaagtatatagtaatctacattggagaaaaaggactatacgaatggatgtattattttttagtacgatcgcagatcaagtgaaaaaagaaataaatcacaaatgcggcttaaatatttcacaaactcgaattttgctattttttgatgaaaacaaaaatcaagcattagcgatggggaagctggcagaagcgcttaatatttcattatcaaccttaagtcgtcaattgcagcaaaagaagactatgagctttattaatatcactagatcggaaaaagattcaagcaagattgtgaatctaagtgaagctggcgtgactaaagctaaagaactaaaaaaaactctgactaagattgagaatttattatttgtctattttgacagagatgctgctaatttatttattaagcaattaaatcaagtcgctgatacttctatgaccctagaaaaaatggaatagggtgcgtgataggtgccttttatgctataatttttctatgctaaattagatatgggaagggttaataaattgaaaattgcattagttactgacagtactagtgtcttaactgatcaagaagttaaaaataatgatattaatgtagttcctattcctgtcatcgtaggtgataaggaatattcagaaggcgttaatatcacttccacccagctttttgagatggagagacaaggtgctgcttttcctaaaacttcacagcccagcatggggcaaatgatagaattatgtaataaattacacggagaaggctatgaagctattatcgctatcactttgtccagtggtatctcaggcttttatcaaaatatggtaaatatggcacataacaatcctgaatataatttatatccatacgattctaagatgacagttagattgcaaggctacttggtgttagctgccgcaagaatgataaaaaatggtatggaaccagaggctatcttaaagaagttagatgagatacgtaagacaattgatgaattctttgtagtagatgatcttaaaaacttaagtcgtggtggtcgtttaagcaatgccggtgcttttattgggacaatgcttcaaatcaagcctttgttaacttttaatgatgaaggaaaaatcgttgcttttgataagatcagatcattaaagcgtgctgtttctaaggtagaaaaattaactttagagaagacagcaaatttgccttataaagataagctacgcttgtttgtatttcactcaaatgatttaaagcaagcggagcaaattaagcaatttgttaatgaaaactttccagataagccagttgatgtagctgaatttagtccagtaatcgctacacacttaggagagaaatcaattgcaattgcatggatggttgatattgataagctcgaattaaaataagaacaaatagccatagaccatagtacaaactatggtcttttttgtttaccctttttacgataatagatttgtaattaaaaattacagttgagatactagtgctgaatgttatagtaaaattgcgagactgtaaaatagtttgtgtaaggatgaatgattccttaaatttatttctttaaacattagaaaaaggagttcctttctcgtatgattggtttgaacaaaaaaacacatacagaaagaagaactccttcatgaatgattttaccaaagattttgctcaagctctattcaatccagacaaaataaatgatttattgcgcaaagagctacaacaggctgttaataacttgttagaagctgaattgactgcctttctgggctatgatccctatgccagaaatggctggaatactggcaactctagaaatggtgcttatttccgcaaagttgatacgcaatttggcccaattgaagtgcaagtgcctcgggatcgcaacggtcaatttcatcagcacacgctgcctggctacaagcagcactcggatatcttggaaagcatgattatcaagctttactccaagggcgtgaccaccagggaaatagccgatctaattgaaaagatgtatggcagccattacagtccagctcaggtatcaaatatttccaagcagatgattccaaaggttgaggcttaccacaaacgcaagctaagcgacaagtttttctgcgtctatttggatgcgacataccttcctttgcgccgagaaacatttgagcgtgaagcagtctatattgccattggcatcaagcctaatgggcacaaggaggtcattgactactgcattgcgcctagcgagaacattgaagtctggacagatatgcttcaaaacatgaaatcccgaggcttaaagcaagttgagctttttctttctgatggtgttgttggcatgaaaacagccttggccaggacttatcctaaagctcattttcaacgctgtttggttcatgtcatgcgcaatatctgcgctaaagtacgcgtcgacgatcgtgaaaagatcatgaacgaattcaaacaggtgcatcaacagacaaacaaagaagaagccacagctgtcctgcatgacttctataccaaatggggcaaggtttacagccatgttatcagaagcttgaaagacatagaaccagatctgctggtcttttataactatcccaagcagatcagagcttcaatttattcgactaacatgattgaatcatttaacaatgtgatcaagcgcaaagctaagcctaaggcagagtttccaactgaacagtcgcttgatgcttttattggcattcaggcaatgagctacaatgaccgttatttcaatcgaattcataaaggctttggtcaggttcaggacaccttagaatcctactttgattaaataaataattaaaaaatcaatttacgagaaagaactatttacacaaaagatttgacagtttcaaaattgctatagtaggcaatagtaatatggttatcataaaatataggaattaatttaataactgttttactatagtatatattttaatgttctttttatgttacaatcatttttaaatcaaattatagaaattcgaggaaatgcatatgtctgcaagcatacttattaagccattagttacaatcagcgttaaattaaacataaggaaattacatcaaattgaaaaatatcaacaataatcaaaacttaaactttactcaagttaaagatatcttagctcaacaggcaattactattgctgccaaagaacaattaagttccgtccaaccaagtagcaatttacataaagtagaacaactgcttaatgaaacagaagaagccgtgaagattttgaaattacggcagcacattccttttgccagttctgaggatatcgagcatttaattactaaagctgaaaaaggactaatcttaactcctgatgatctagaaaaagtagcagaatttttacgagtaaatcgcctactacaacgctttttagccagacatgagcagctagcaccattactcaatgcatatgtccaagacatgacgctattgccagacattgaagatgctatttatactactattgaacatggtcaagtacgcgatgaggcagatcgtgaactagcaaaaatgtgccgcgacttaaagaaatctgttactgaactcaaaactgcattaaatcattttttgactagtaaacctaatcaaaaaatgattagagacgcaatgatcgttgaaaaagagggctacgctaccattccaattaaagcaaactacaaaaatcaattgtcagggactattgtggctgtttctaatggtggacaaaccgtctactttcaacctgctaaggttgttcgtctaaatcagcaaataaccaatttaaaggcacaaatacgtaatctagaactagcaatcttaggtgctttaactgcaaaaatatacgacgtgaaggatgatattaagcgtaacattgaactaatcactttactagatatgatttttgctaggggaaagtttgcacaaaaatataattgtattaggcctaaaattaatcgtgaaaattctcttgttttacgtgcagtgcggcatcccttgatcattaatcctgttccgttaaccttagaattaacccaagaaaatagtgttctaatgattacaggaccaaatgctggtggtaaaaccgtcgcgcttaaaactactggcttgatgattttaatgaccgaactaggtctgtttttaccaagcgataaaccatgtgatattccattaatggatgacgtttttactttaataggtgatcaccaggacctagataattctctgagtactttttcagccgaaatgaaagatattgccatgattaccaaatatgctcaattccatagtttagtattattagatgaattagggacagggacagatccaaatgaaggaagcgcactcgctattggtattctacaagagttgtatttacgtggctgtttaatcatggccacaacacactacagctctattaaggattttgctaagcagcatgatggttttatcacagctgcaatggattttgacttaaaaaatctgcaacctacttataagttaaagataggaagtattggtaatagtcgagcactatggatcgccaaaaaatcaggtattccagaaaatgttttgcatcaagcagaagccatattagcgggcaataatttacctttatctttaaaaaaacgtttcgttcaccagcggaaaaacaaaagcaacctggttgttaaaaaagaatttcataaaggtgatattgtatatgctaccaatttaaaagaagaaggaatcttttataaatatcttcctacccaaaatgcagcaaagatatttgtgacaaaagaatttgtagaagtaccactcagacgtttacaattaagacgactagctaaagacttgtacccaaaaggatataacttagatttactctttgttaaagactggcaagattataagtttaatcgtgatctagatcgtggctccaaaaaagcttacaagaaattgaaacattaataaaaaacgagtttggaattgaatagccaaactcgtttttgcatttaatttgattaatcgtgatttttttttgagatctcattgagagccgcacgctgttttttctgatcaacatgagtatatagatcggtggctgaagtgcctttttgacctagctgttgtgctacaagcacttgatctttagttacttcatagagctcagaagcaaccgtatgacgtaacttatgtggggtaaggggatgaccaaaagctgcagaatacttattgatcattttttcaattgcattagttgtaattcgccgtgtttgaccatgccattgagttaaaaagaatgccacttgcttactatctgcatgatagcgttcattacgaatacctttatatcgcttgatataaggaagtgtccattctgcaattggtacactatctttttgtccgccttttctagttacatctagtacagcatccttaaggtttaaatcactcaaatcaacgccagcacattcagacacccgaatgccggtacctaagattaatgcagcaattgccatgtcacgttctttgttttgcttaaaaccaatctttgcttgcttattacaatggttaatatagtcctgatcaataaaagtcaaaaattcaaattttaacttaccagtgtacatgtggctttcaagtacatgagcccgataattaagtgtttgcgtatcatttaaagaattaattttaagcattacattccgttcaaaatatggctcaccatgattattgtcggcagtaatggttaaaaacttaaatagggagcgtaaagcattaattgagcgattaatcgtagtgggggagtttagtcggccttgcttattacgggtatgtcctaaataatcaatatacagcattatgtcattgcgacgtaagttggctaatgtatccgtagtaacatgagcattatctgaagcagaagagatattttcttgacgtagccaatcgaagaagcgtcgaatttcagttaagtactggtaagtagtagttaatgaatgattagtaccaagattaaattgcttaacaaaatcaggcaatttatttacttcaatttggatcaattctaggtatttagcagtttccatatctactccttttgcgaactaatgtttatattatatcatacaaatacgttaatcataaaaaaatcacctattctcaggaataggtgataaaaaacagtctaatttaaaattactgcgctcattcgaacgtgaatatctatagtactaacgtagaaaaatgattgcaactaaatttaacttagataatcatgtcactataactagaataccagcaacgcttatagaaaactcttagcattctaattatagcaacagtgattgctcgtcagtaagtaagggcaaattacatttagtaattcaaacattacttacaaacatatgttgtttgtatggtacaacacttttcaatcgtttattttatgctctttattgctaatgttcaagtaaaatataacattttttataaagaatcgaaaaaagcttattttccttgtttagtcgtattttttggctaaaaattgtacaatagatgaaaatacattatgtgagatgaggaaaaagtatgacagaagaaattagtgtaaacttccaagctaaaaaccctagtggtatcaaattactgaatcgtctatatgatggtcacttagtgttaaacgacattggcgttcgtttagatgaacaacttaataatgaagatgaagaattgactgtaccaactcaagcagatgtagataacttgagtgagacttttggtaaaactgtcacagttttcagtgatattgccgatgcatatggggatgtaaataattttgcgaaaaactttggtggtaccactaagatttttgctcaaaagttaattactgaactagtagatttcaataatggtattgcggacattggagattccgaaggcggtttagaaaactacgataacgataagcttaatgactggattaatcaagtaatgagcgacatcgttgaaactaatgaagcatttaatgcattaattgatgataaataataaaaagtgtcagtccttaaaatgaggattgacactttttatagttaattgctttttaaactggacattggataaactgtgtaatcagcacggtaaacaaatagacgatgaccatcaatcacaaattgagttgcattcttcatatcactcttatgaattgagacgtgatttccaataaagacagcaatcggcattcctaattggcttctaatcattactactcttgagctaccattccaatcgtttttaaaattctgatacattgtatttaacagaggaacagaacgattttgatcgtcgatcttaacttttttgttaaatgcatcctcgtagtttttcagtccttcataggcaatcatagtagaaccaacgtgaatcattcgattattgccatagtcaacatcaattacgctagaatgttcagtgccattactacttttctgtgacatctttttatcagtatgaatattaactgacttagctttgatctggtcgatcttttgtccattagaatcatacgttgatactgttaagggcaatgccccaatcttagagcgcatagataattcccagttttgaaaatcactacaaccagtcagagaaagcaataatactcccagacctaagaataaagctaacttctttttaaatttcatccttatcatttcatccttatcttatcctcgtttctatataatgccttaattttaacatggataaaaaagggatgcagataaataaattggaaatgatttgtcagttcatttacgttttagggatgcatcaaaaaagcagcaaatatttgctgctaaaaataaattagaacttgtctgctttgacgtaagcatttttaccaattcgatagtaagcttcattattgatgtaatgtttagggccataagtcttgatcggtgaaccggattttttagtagaccattttgtattaatggtgccatcatttttatacactttagcatcagctttaaagacgcgtgaattgcctagtacgttacttgccatcacatacttgtcttcaccgacacgaatcattgatttgcctttaattctcaccttattgtcataataagcaatagagctgtaagcattataaaaatcatttgtccggttgctatttttgtcataaacatatgacttgtacataactgtagctgttttcttggtattggaagccttaggagcctgtgaaactgccgcgttacctgcgattgataatggcaagactgtaatattgccatcagtattcattccgcgccaattatctgtgaactgccagattgcgacaccatccattgaagggaagtatttaaagttgggttggtctactcggcctgaaatcgcatatgcggctacccagagtgaattaggatacttgttcacgatagatggagtattaatattgttttgcaaaacggaagaactagcatagagaagtggttgatagccagccgccttaatttgatccataaaggcaataatagccttagctgtcacatttttaccattagtaatgatattgccctgaccagtttcataatcgcaggctaagtatgagccagctggtaatcccaacgccttagcagaagaaattgcgtattgcgcttcgcgcttagcggccgatgaacttgaactaaaagttgcaaaatgataagccatcggcatcatatcattagcaatagcagatttaatctgattggctgccttagggttgcgataactggttccctcactaactttaacgattgcaaattgagaaccagccttggcatgagcagttaaatctgcgctttggtagctggcaacatcaattccaagggctttagcaacaactgatgttgatgaagcttgcacaatgctctctgagtcagagaaacgagtcatttgagataaaagtgtgacacctgcattcgttaacatagttgcacatgctaatttaataattgatttccttttaaacaatttatgtcctccatacttagtggagagaatcttatctatatctctcacataatttatactttatagactacagatatagttctcaaaaggcaatagatgagatcatttattaatatatcagtaatcaaaccgaaaaaaattgaaatcaaattgagatatacaatagacaaaaaataaagaattagtcgtggcaagaaatatgccccaaatctaaagaaaagtataagacagtcaaataatatattttaaaagtgacaagaaatagttcattcgcttaaaataaagaaactgtcaaatcttttgtgtaaatagatctttctcgtaaattgattttttaattcccggatttaaaattgaagtgcaacactaagtgttaaacaaaaaggccatgaagacctaaacttgaagtgacgaaaaatcaagaaaggaagatctttatgaccaattcaaattctagcatttctaagcactatcatcaattaaccagcgtacaacgtggacaaattcaagcaatgctggattccggcataacttcccgtactgttatcgctcaagaagtcggctgccataagtcgacaatcagtcgcgaaatcaaacgcggaagtgtcctgcaaagagacagcagctatttattgtatgagcactattacgctgatactgcacagatttattatgagaagcgtcgcaaaaactgctatcagcgcaatccattgaagcattatgctgtctttttgagaatgctctccagacgctttaaagctaaatttgatgccaccagcatcgatgagttcgttggtgaattcaaaaggactatgccaggctacccttgtcccagcacaccaaccgtctatcgctatattgatcagggcttgctggacataagcaatattgatctgcctatgaagctcaaaagacgcaggaacaagcgtcatcacagccatggcggtcacgctttgcacaagaagcatcttggcaattccattgaacagcgtcctaaggaggttgaagacagaaaagctccgctgcactgggaaggagatctggttaaaggcgtcagacgcaagaatcagcctgctttaatgactttgactgaaagaaccacacgctttgaagtagttatcaagattcctgactatcgggcaagcacatgccaaaggctgcttcaaaaggagattgacagacatcctgcctggtttaaatcaatcacgtttgacaatggctctgagtttgcggatatgaccaagatcaagggctgccagatttactttgctcacccatattctccatgggaaaggggcaccaatgagaactgcaatggtcttttgcgtcaattcttccctaagggcaagagcatgaaagacaagtcaaaagcttatgttcaacaggcaactgatgccattaaccacaaatatcgccgaatcctccaatatcacacagcagaggaactcttcaagcaatatatctcttcataacctaactgttgcacttaatttgacaattcaggtgattttttaattatttatttaatcaaagtaggattctaaggtgtcctgaacctgaccaaagcctttatgaattcgattgaaataacggtcattgtagctcattgcctgaatgccaataaaagcatcaagcgactgttcagttggaaactctgccttaggcttagctttgcgcttgatcacattgttaaatgattcaatcatgttagtcgaataaattgaagctctgatctgcttgggatagttataaaagaccagcagatctggttctatgtctttcaagcttctgataacatggctgtaaaccttgccccatttggtatagaagtcatgcaggacagctgtggcttcttctttgtttgtctgttgatgcacctgtttgaattcgttcatgatcttttcacgatcgtcgacgcgtactttagcgcagatattgcgcatgacatgaaccaaacagcgttgaaaatgagctttaggataagtcctggccaaggctgttttcatgccaacaacaccatcagaaagaaaaagctcaacttgctttaagcctcgggatttcatgttttgaagcatatctgtccagacttcaatgttctcgctaggcgcaatgcagtagtcaatgacctccttgtgcccattaggcttgatgccaatggcaatatagactgcttcacgctcaaatgtttctcggcgcaaaggaaggtatgtcgcatccaaatagacgcagaaaaacttgtcgcttagcttgcgtttgtggtaagcctcaacctttggaatcatctgcttggaaatatttgatacctgagctggactgtaatggctgccatacatcttttcaattagatcggctatttccctggtggtcacgcccttggagtaaagcttgataatcatgctttccaagatatccgagtgctgcttgtagccaggcagcgtgtgctgatgaaattgaccgttgcgatcccgaggcacttgcacttcaattgggccaaattgcgtatcaactttgcggaaataagcaccatttctagagttgccagtatttcagccatttctggcatagggatcatagcccagaaaggcagtcaattcagcttctaacaagttattaacagcctgttgtagctctttgcgcaataaatcatttattttgtctggattgaatagagcttgagcaaaatctttggtaaaatcattcatgaaggagttcttctttctgtatgtgtttttttgttcaaaccaatcatacgagaaaggaactcctttttctaatgtttaaagaaataaatttaaggaatcattcatccttacacaaactattttacagtctcaaaataaagatagttaaagaaagcgctttgtttaatcagaaatgtgataagatattttgcaagaaagcaaatgtgatcaaaatgctacattggatttgggtattaattgttggtggagtaatcggcttaattgcaggtgctttaactggacatggtaagtcaatgaactggattgctaatattttagcaggattggttggatcttcactaggccaagcccttttaggggaatggggaccgaaggttgcggacatggcaattgtaccgtcaattttaggtgcagttatcttggtaatcgtcgttgccttcattatgaataaaattagacctgcaacagattgagtttattcagatttttattctagctagataagcaaagagcctgattggacgaattatgtctgatttcggctcttttttcgtcttccctggtcagcagaggaggggagatagaggtataataatgaattaaaatgttgcttgtttgtataaagattgagtaaccacgataaattaattcattaaaaagaaatcttagagtgattctcagcattttttgaagattgaaactttatttagatgtcttattcatgtaaaaacacagatttaagtagcgacttgagtcatgagtttagtagaattatcatttttaccgcttgattatttatttaagaaatttcaatatgtgtattattgcagcaaatcttaaaaatagggaataagaataaatataaaagcacttaataccgatttgtatgtagcaaaaagagcaaagaatttataaaatatttttttacgaatttaaaatgaaatacaaaacgttaaaacaataaaaataacaaaagcacaaatttaccaaaattaggcttttgcgagataggtttatctagcgatcattaaaatttttgttttaaagaaagctatagcataaaaataaaaaatggctttatagatactaaaggcaaaactagcaaatattactcaactattttcattgtttttaattagaattactttaccataattgtttcaaaatacttctctttgaaggttgttttattgattattgtcagcatattattcaattcaggaaactgtcaaatcttttgtgtaaatagttctttctcgtaaattgattttttaattatttatttaatcaaagtaggattctaaggtgtcctgaacctgaccaaagcctttagaattcgattgaaataacggtcattgtagctcattgcctgaatgccaataaaagcatcaagcgactgttcagttggaaactctgccttaggcttagctttgcgcttgatcacattgttaaatgattcaatcatgttagtcgaataaattgaagctctgatctgcttgggatagttataaaagaccagcagatctggttctatgtctttcaagcttctgataacatggctgtaaaccttgccccatttggtatagaagtcatgcaggacagctgtggcttcttctttgtttgtctgttgatgcacctgtttgaattcgttcatgatcttttcacgatcgtcgacgcgtactttagcgcagatattgcgcatgacatgaaccaaacagcgttgaaaatgagctttaggataagtcctggccaaggctgttttcatgccaacaacaccatcagaaagaaaaagctcaacttgctttaagcctcgggatttcatgttttgaagcatatctgtccagacttcaatgttctcgctaggtgcaatgcagtagtcaatgacctccttgtgcccattaggcttgatgccaatggcaatatagactgcttcacgctcaaatgtttctcggcgcaaaggaaggtatgtcgcatccaaatagacgcagaaaaacttgtcgcttagcttgcgtttgtggtaagcctcaacctttggaatcatctgcttggaaatatttgatacctgagctggactgtaatggctgccatacatcttttcaattagatcggctatttccctggtggtcacgcccttggagtaaagcttgataatcatgctttccaagatatccgagtgctgcttgtagtcaggcagcgtgtgctgatgaaattgaccgttgcgatcccgaggcacttgcacttcaattgggccaaattgcgtatcaactttgcggaaataagcaccatttctagagttgccagtattccagccatttctggcatagggatcatagcccagaaaggcagtcaattcagcttctaacaagttattaacagcctgttgtagctctttgcgcaataaatcatttattttgtctggattgaatagagcttgagcaaaatctttggtaaaatcattcatgaaggagttcttctttctgtatgtgtttttttgttcaaaccaatcatacgagaaaggaactcctttttctaatgtttaaagaaataaatttaaggaatcattcatccttacacaaaatattttacagtctctgaattcgagttaacaaatccaaaataagacttatttgctgaaacaattaaattaattatgacttctattattaaattgattgtttttcaatctggctttacataatatgaattatacgcagatatgtcttgaagcattttactgtactctctgccatccttctcgtaaatttgatataaaaaatcatctgcaaaaattacagatgatccataaaacttattcatttttaaaattcaatttattgtttgtcttcaaagctaacagatatacaaaattaatcgctgctaaaaatacaactgcaaaccaaatagtttttaatacccaaatcttttgcagtaacgctgaaacgtttgctccaactgcaaatgaaattgttatcatcatataattaacggctgctgtgtgctgactcttatctgcgccaaagaaaaatgcactccacgcaactacagatttcttcaaattacctgttgtaaatacattattgtatcccatgccttcaattttgctgaaagatgcattttgaacagctaagccaaaagcaattgctggaactatatagtaatttggtacgcttttaggtaaaaatccaacgacggtacaaattactaatattgggaacaaacaaaatactctccaatattgactcttaacgtatttatgaaaaagtcctacaagaagtaatcctagtgaaaaagctataaatgtacttgcacgattgatcattcctggaatattatggtcagccaatgctgaactgaaaaatattacgtttcctgtttgtccagcagataatgtgtgtcccctttggatatatgtataagcatcaataaagccaccgcagaatgttaaagcacaagctaattgccttgattctgaaggcttagcactgttaaaaatatctcgtagattttttcgtaaactcattagtatctttaatcctccaaaatatagtcatagtttattataggctttattaattattgtagttacatttgattgatcgattttattcttattattttgtaaatttctcttaaaaatttacaaggctaaatatttaatacaaggtgttatttgcggtagaatagcctaaaaggttgaggttacgagctttattcactaaataaataagccaatattgatatttaatataatacaagttaacactattaaaatagtttattcattttcaccctaatctttgagactgtaaaatagtttgtgtaaggatgaatgattccttaaatttatttctttaaacattagaaaaaggagttcctttctcgtatgattggtttgaacaaaaaaaacacatacagaaagaagaactccttcatgaatgattttaccaaagattttgctcaagctctattcaatccagacaaaataaatgatttattgcgcaaagaactacaacaggctgttaataacttgctagaagctgaattgactgcctttctgggctatgatccctatgccagaaatggctggaatactggcaactctagaaatggtgcttatttccgcaaagttgatacgcaatttggcccaattgaagtgcaagtgcctcgggatcgcaacggtcaatttcatcagcacacgctgcctgactacaagcagcactctgatgttttggaaagcacgattatcaagctctactccaaaggcgtaactaccagagaaatcgctgacttgattgagaaaatgtatggcagtcattatagtccagctcaagtatcaaatatttccaagcagatgctccccaaggttgaggcttaccacaaacgcaagctaagcgacaagtttttctgcgtctatttggatgcgacataccttcctttgcgccgagaaacgtttgagcgttgagcgtgaagcagtctatattgccattggcattaaacctaatggacataaggaagtcattgactactgcattgctcctagtgagaacattgaagtctggacagagatgcttcaaaacatgaagtccagaggcttgaagcaagttgaactctttctttctgatggtgttgttggcatgaaaacagccttggccaggacttatcctaaagctcattttcaacgctgtttggttcatgtcatgcgcaatatctgcgctaaagtacgcgtcgacgatcgtgaaaagatcatgaacgaattcaaacaggtgcatcaacagacaaacaaagaagaagccacagctgtcctgcatgacttctataccaaatggggcaaggtttacagccatgttatcagaagcttgaaagacatagaaccagatctgctggtcttttataactatcccaagcagatcagagcttcaatttattcgactaacatgattgaatcatttaacaatgtgatcaagcgcaaagctaagcctaaggcagagtttccaactgaacagtcgcttgatgcttttattggtattcaggcaatgagctacaatgaccgttatttcaatcgaattcataaaggctttggtcaggttcaggacaccttagaatcctactttgattaaataaataattaaaaaatcaatttacgagaaagaactatttacacaaaagatttgacagtttccaaatatgtgttggctatactgaaaataatatacatattatcaacgcgtggtgctagttaaatctttctagacaataagccaaattataagctaaaattgcaatttccaaccggctttgaaagcctatcagactacgtgctcgattgttctcggcattgtaataggtcagaagcgaaaagtcgctttcaattgttctgcgaatagccatcaattgatgatcattgtgctttttagctcctgtcatatttttacgatatggtgtccaaagttcataacccatttgttttagctgttgatgcagttctttgcctaaatagccttcgtcgccaagaagatagtaattagatggatgggcattttccagcagttcaactgtctccttggcatcatgaactgatgcttttgttacgacataatcaagaatgtaaccgtcatcgctaacaatggcatgaactttgaaaccatagaagtaaattttcttggtggccttataaccaatgttggcataaccgcgaaaaattttagcacgatagttgcgaattggttggcaaacaggtaccggaaagctgtcaatgatcaagaaatgtccattcaggtcaacctttttattcatttcttgccgtatctgataaatcaattgcaatagctgacgtgaacgtcgattaaaacgtgagtgtgataaacaattgaaacattcacagaatcttctttgtgattcaattcctgtcttagcttgccagataagtaaagccaaaatcagactgtccgtagttttaatttgatcaatatttcgccgatgagtaaactcagccggtgcatacaaacgataccagtgccgacaaattatcactaaatctttaaaactaacttgtaaatggtggctaaaacgcttaagcttaaggcagttcaatcagatcaggctcttttctattattatacaagttgagtctaacaagattggacttttttattaactaaaacgatttaactagcaccacgcgtatttatcaatgaaaaagtaaagtaataatataactgaaccaattctatttaataagcttacattaggcctttcaagagtccatgggttagtgaattgaagtataaaatataaattttaaatatacagtggttgctagacatcaaattattaataatattatagtcattattatggaagtgaatgaattttgaatatgaattaccacattagacccgttaaccagaagatttaaaagatttgcaagctatttctcgcgaaacatttaaagctactttcgatgcctatacagctacaaatgatatggataaatttttagaaactaattattctgatgaaaaattgaggcaagaacttaataatgctgatagtaaatttttctttttacaagttggaccagaaattgctggatatttgaaagttaatcaagctagtgctcaaagtgaaaatttaggttccgatcattttgaacttgaacgaatttatcttcgacaaaaattccagcatcagggattgggaaaagttttatgcaaaaaatggatttaagtgctttagtcaacatacatatcaagttggaaatgatccacaaattgattatttattagagaaaaattataattaaaaaatctaaaataatggtaatgtcttcctattaatactccctatcgagatttctatatacttatctttcaaacatatgatttgttaattttattaaaaatctttttacatgataaaaataacgaatcgcttcctatgaatatacattatttgttaacatcgccttgatatgagatcaatgacacattcgcgaacatagttcgcaagtttcagaaataaatacctttatttccatattcttacagcattagatattggtggctttataacagtcttgtttcatactgctaaacccagccagtacctcttaatatctaatgccttatgtaaaggctcgtctgtgtcaagttttttctttatttaaaatactaaaagtaggtctgaatctttaaccttacttccgttaatagttttaccatgctttggatgtttcgttatatcctgtgcccagtctctgatatttagactagcgttataatctctaactaggacttgtccgcaattaggacaggtccattctttttctccaactttcaatttttcattaaccattccgcattcatgacaagctttactggtatcataactatctacctctaagagcaggtgtccatcgtcttggtaaatatattccatcatttttccaaatgaagctggctgaaaagtggctaatttatgattggtattttttcttagcccaatagtctttattgcgtctgcatattctcatagtaaaactgtcaagctgttccattgccaaaattgggtagttgatgctaaattccttagccttttgctttcttctttgataaacgattctttcagtttcaacagggaagggcctcgtcttcgtcactgtcaaaactgtcttcatcaaacaagctggtttggccggataaaggcatttgttcttaagacttgccgtagcgtttttgcgttaggtaggctacttgttcacgcaggagggcgatctcttcgtttaaattattaattgtagccattaagccttggatggtctcatcttttgtttcaactttagtcattgggatcccccctcttatttttttgataaactaaagcataccagaaacgcacgcaaaattaatagaaattgcgtgcgtttgtcgtttttattcccggttcgatcgagaagcccttcatcagccagtctacttgctcatccgataaaaccctgacttcattctgattgttgggccaaacaattttaccgttttcgaatcttttgtagagcagccaatagccttggccgtcccaatacaaggctttgaaacgatcacggctgccaccacagaaaataaagacttttccagaaaaaggatctaagttgaatttatctttgactatcgcagctaagccatcaattccgcgtctcatatcggtccgcccacagacaaaatagacctggcccagatcataaagattgatcatgacagtactttttccaaaagtttattcataatttcagaatccagggaactataaaaatttagttcaaggtcgcctttttcaagcattatctttgcccccttaagttttatgagacaaggataaccgaaaagtgggagctaaaaaagatacttaagtttttgatgcttacaatagtactaattgcaactagtgtattaaaaagctttttcatataatgataaaaaataagaggcagttatatcaactgtctcttatttgtccactttaaattaagcgttgaaagcatcagtaagtggtggaacaacttgcttcttacgtgatacaacacctggtaatttaacttctgaatcttcaagtttcttgtcaaatgctttttcaaataaagtcttagtctcgtcactacctacaactaaagcttctgagtcagaatcaagaatgttagtgaccaaaagcataaacatatcatagttgttgtcctttgatgaagcttccatagctttcaagaaagcatctttacgcttcaaagcatctgataaatcaacaacgttgatttgtgctacacgtacattgtgaccgtttaattcaaagctcttagcatctaaatcgattaactcttcttctgacttatcatcgatattagttccagccttaagcattgctaaaccgtattccttgtagtcaacaccagcaatcttagataaagcttctacagcttccttatcttcatcagtagtagttggtgatttaagaagcaaagtgtctgaaatgatagctgaaagcatcaagccagcaagtttttcaggaatttcaacattgttttcgttaaacatcttccatacgatagttgatgtacaacccttaggttctgcacggtagtacaaaggatctgcagtattaaaattcattattctatggtgatccacaacatgagtaaccttaactttgtcaatatctgaaacactttgttgtggttcattgtggtcaaccaacataacagatttaacttctggagcagcttctttaattacacgaggtgctttaaagccgaatgttttaagagcatatgcagtttcatcattaggctcacccaaggcaacggcttcagtgttgtaacctaacttgttttgcaaatatgaaaatgcaatagcagtgccaattgcatcagtatctggattttggtgtccaaaaacaaattctttttccattaaataaattgcctctttttctaattattttatttaatttcttcacttaatagtttactaaaattattgttcctatccaagttattgtctaagaaaatctgtaattccgttagtaatttcttcatcctaggaacatctaattttcctctacgataaacacaagcagtcgtaaactcaggcatatttttaatataaacaggagtcaaattaatctcatccttatgcgcctcgtagtaagtctgatctacataagtatcaagatcagtattttctgcaattttgatcatttccttagtagatgcaattttaaacggagtaacgagatcaatctttttactaaagttaagtcgcattaatcttgataagtagtaattctccggatatgcaacccactttctgttgccaaaacgagtaacagaatatgtcccttctgcttccacattatccttgtgagtcagtacaacaatatgctcagggcaaatatcacgatgattgtattgatgacggaaattagctcctgttttattagtagtatctggcatatacataatcgccatatcaatcatattggaatcaagtctgtgccatagctctttgcggtcaaagtaatcaacggtaaaagttacttctggatactttttattgaagtaacgtaaaaattggtagaaaagatcaacatgtacagactctagaataccaattgaaatattgcctttatctgactgggtatattcttgaatgtcactaataacaccattaatggtatttagcaactctatcgctgctgcttccatttctttaccagcttcggttaggtataacttcttccccatttgtccaaataatggagcaccaatagcgcgttccaatttttttacttgctgagttaaagccggttgggtaatacctaaaatttgtgcagcttgggtataattcatcgtctcaatcaattgtaaaaaataacgcaatgatttagccgataaaatagtatcacttttagacataacgattatctctttcctaaaatattattttacgataagccatgtcccataacactgctattatctatccaaaacagtgtcaaaacatatgtcttaacactgtttttaaagattaatatattgttttagttaaactcaaatcttaattttgactactaatgggtcttcccaattcaatacttacgggcgtcccatcaacggtagtatcaataacaaatgagccgttagaataacgatcgcctaatggataatccgtagttttaatatttacatgacggtcactagaagtagtgacatgtaacaaatgatcttgagcatatggcattagagcaacaattctatgcggtttattcttcaattcccgcagtactagtacccctcgcttggctctagaaactttattaactagtttaagtttgaattgcttaaatgccccacgttgagtaattagcccaacatgcattaaatcaacgtacttagaatcaactaggacataatttacgatataatcgtcatctttcaagttagcagatttaacacctactgctttagctcctgaagttggtatctcgctaacatcatatctaattgcataggcgcgatgagtaaataatgtgatttccttatgattatctgatttgatcaaatctaccccaaccacataactatcctttccctttaacttgatagctgtcattgcacgtgacttataagttctcgtcggctgtaagttagctaactccaattgtttgatataaccgtcattagtagccagaataaagttgcaatcagtattcaatttatcaaatacaaagacgcgaataatttgctcatcactgtctaatccaatttcttgtgataggtgttgtcctgtttctttccatttggtttcaattagttcatgtactggacgataaatgacattccccttattggtaaataaatacaagttagtcagggtagatagtgtgttttcataaactactttgtcaccatctggtaaaccattgtcatcatcattagttgactgatatgaacgtaaagatgaacgctttaaatagccatctcgactaattagtactctaacctgttcatcagcaactaaggctttttcatcaatttcaactttagcactttcttctgaaatttgagttcgacgtggattagcaaattctttcttgactgcatttaactctttaataatttctttttctaaagttgcacgatctgataataatttacggtatttttcggccaatttatttaacttgtcttgttcagcaattaattcattaacatccgtattagttaaacgataaagttgtaaagaaacaattgcttcagcttgtttttcagtaaatttatacttaactattaaattcttcttagcatcggctttatttttagaagcgcggatggttttaattacttgatccaaaatatccatggcatgaatcaagccctgaataatctctaatctagcttctgccttatctaagtcaaatttcgtacgtttagttacaacgtcttcttcatgttctaaataagaagctaaaattcgttttagcccaacttgaacaggagtcatgtgatcaatagcgaccatgttgaagttataagatacttgtaagtcagtatttttaaataaataatttaaaatattctgcgcatcagcatcttttttcaattcaatcacaattgacaaaccatggcggtcagtttcatcacgaacttctgcgattccatcaatttctttattcagacggatttcatctatcttttttactaatagtgctttgttaacatcgaatggaatttccgtagcaacaatttcttgcctatgcccacgaatttcttgaatagtggttttggcacggacttgaattctaccacgtcctgtcttatatgcttccttaattcccttagtccccataacaatagcaccagttggaaagtcagggccttttacatatttcatcaaatcttcaagagaagcatcaggatgtttcaacaaataaattgttgcatcaatcacttcacctaagttatgtggtggaatctctgtagcgtaaccagatgagatcccagttgatccattaactaataagttaggaaagcgtgcaggtaagactgtaggttcatactcagtatcgtcaaaattaagcaccatgtttacggtttgcttatcaatatcttgcaaaagcatattagagattttgcttaagcgggattccgtataacgcatagctgctggaccatcaccatccattgaaccattgttaccatgcatttcaactaacggctcgcgcatcttccagtcttgtgataagtgcactaaagccccatagattgagctgtcaccgtgagggtgaaagttacccatgatattaccgacagccttagcagcctttttaaatggtttatcataagtattactatcttgatacattgcataaaggatacgccgctgaactggctttaagccatctcgaatatcaggcaaagcacgttcttgaataatatattttgaatatcgtccaaaacgttcacccattacttgttcaagtggcatttctcgaattcgttcttttgtggccattaaatttaaaaccttcttttattcatcttcggattctagaattgagccgtcttcgcccattctgaatttaacattttcttcaatccactttcttcttgcggctactttatcacccattaaggtagtaactcgtctctcagcaagagcagcatcgtcaattttaactctgattaacattctcgatttaggatccatagtagtagcccatagctgttccgcgttcatttcacctaaacctttgaatcgctgcagcgaatagccacgtcccattttcttttcatcatcagctagttcttcatcagtccatgcatattgaacttgcgtctttttgcctcgacctttttgtaagcgataaagcggtggcagagcaatataaacttttccgtgttcaatcattggccgcatataacgataaaagaatgttaatagcaagatctgaatgtgagcaccatcatcgtcggcgtcagtcatgataatgactttatcataattagagtcatcaacattaaactcggttcctacaccagcaccaatggtataaatcatggtattaatttcttcgtttttaaagatatcctgcaattttgccttttgagtatttaatactttaccacgaagaggcaaaattgcttgaaatcttctgtctctaccttgcttagcagatccaccagctgaatcaccttcgaccaagaatagttcattctttttaggatttcgcgattgagctggcgttaatttaccagacaaaacttctttttttcgtctctttttaccattcctgctttcatcacgtgcctttttagcagcttcacgtgcatccctagccctttgagccttcttaactagttcctgagccagctcaccattttccattaaatagtaagacattttctcataaacaagtgaatctacagcagaacgtgcttgtggagtacctaatttacccttagtctgtccttcaaattcaagtaattcttcagggattttaacagataaaaccgcgctaagcccttcacgataatcagaaccatcaatatttttatcttttttacctagtagaccctgctttttagcataatcgttaaatgcacgtgtaaatccactacgagcacctgactcatgggtaccaccatcaccagttctaacattgttaacaaatgaaactaaattttctgaatatccatcactatattgacctgaaaattcaatttccatgccatcttgcttgccttcaaaataaaagacatcactaattgtgcctttaccttcgtttaaatacttaacaaatgatttaattccatcatcatactgaaaaacatcatgatgttctggctcacgctcatctgttaagacaaatttaacccctttaagtagaaaagcagattcacgaattctctcctgaattgtctcatacttatacttcgtggttgaaaagatagtctcatctggcttaaacgtaatggtagtccctgttggctcttttgtctttcctacacactttaatgtacctaccggatgcccaccatctttaaattcttcttcataagctttaccatcgcgaacgactctaaccttcatataacttgaaagtgcattaacaacggatgaacctacgccatgcaacccgcctgaagttttataattttgttcagtaaacttaccaccagcatgtaatacagttaaaataacttcaattgtgggcttacccgatttgtgcattcctgtcggcataccacgcccaaagtctcttacagtaacactattatctgaatgaatggttacatcaatttctttaccaaaaccagccatggcttcatcgacagagttatcgacgatttcatacactaattgattaagaccatgaatatcagttgaaccaatatacataccaggtcttttacgaacggcttctaggccatgtaaaatttgaattgaagaatcatcataagtattagcttttgccactaaaattcctccacttgttcattaatttaaccagcaccatatatttaaaagataatctttgctaaaatagcgatagattaataggagtgttgttaaatatgtttgcattaaaatttgcatcgttgtttattttagcatacttgattggatcattcccaacaggtgtgttagtgggtaatatcttttttcataaagatattaggaaatacggatctggaaatatcggaacgactaatacctttagagtattaggaccagctgctggaatcattgtctttatagtagattttctcaaaggaacttttgctacagtattaccaataatttttaaactaggaccacattatctttgcttgatttttggcttagctgcaattttaggccacgcttttcctgtctttttaaagttcaaaggaggcaaggcagtagcaacttccgctggatttttactaggatataatgtccattttttcttgatctgtgcgttaatcttcttccctatcttatttattacaagtatggtttcattaactagtttgatctcagtagttctaatctttattgcttcattctttttccacgatcttgccttgagcattatcagtggattgctcgtaatcttaatttactggagtcaccgaagcaatattattcgaatcgaacatcaccaagagaatctggttccattcggtctagtgtattggtataaaaagaaacatactaactcaaactaaaattataaaaccagcaagcatttagcttgttggtttttgtttacctaaatattatacttttgcaaacaatagttcgcaagtacaaacaaatatttttattttattataatgatctatttatttcaaaatcttaattaaatcgtctttactcattgttgcatcagcaatctgatcattttgcaaaattatatcagctaattctgctttcttttgctgtaaagcaatgattctctcttcaatactgtcttctgtaaccatcttataaatcttaacagaatgcttttgaccaattctatgagctcgatccgtcgcctgtttttctgcagccaagttccaccaaggatcataatgaattacaacatcagcaccagtcaagttaatgcctgttccgcctgcttttaatgaaatcaaaaagacccctggttgagccatttgattaaacttttgaacttgttcttgacgcttagttttaggtgttgatccagtaatagtaaataaaggtagtcttaatctggcaaggttttcatgcaaaatatctagcatagctgtgaactgtgaaaacaataaaattttatgtccatttgctagattattcttaatcaactcaattgtagcaattaatttattagacttgccgtgatagttttcataaagcaaatgaggatcacaacaaatttcacgtaatttagtaatctgagccaaaatttgaaaacgtgatctcttaaagtcttcatccccctgtccatttaattgagcgataatcttttgcgtctgcatattatacaaatcagcttgtttcttattcattttaacaggcacaatttcttcatctttgtcaggtaagtcacgtagcacatctttttttagacgccgcaagataaagggtattatcatattagctaattgatcttctgcttctttatcttgctctttaacaatcggtaattcatactttttcctaaagtcaggatataaacctaaaaaacctggcattaagtaatcaaaaatactccataactcgctcaatttattttcaatcggtgttcctgttagagccagtttatgatgcgctttaatgactttgactgtcttggcggtaactgattgctgattcttaatattttgtgcttcatcaattacttctacatcaaaaattagattttggtacgcttctagatctcgattaagcgattgatatgaactgattagcagattatactttttagcatctaaaagcaatctctctcgttcttttttagtgccatctaatagagccacattaaggctaggtgcgaactttttaacttctgcctgccaattatagataacagaagcaggcgcaacgattaagctaggtaactgattttgcattttttctttgcgagctaaaagaagactaataatctgcaaggttttacctaatcccatctcatcagcaagtagcccgccaaatttataattaacgatagtgcttagccaattaaaacctatcttctgatatggacgcaaaatattttgcaaactaactggtatttgattttgcttcaactgattcttagctaaatcattaatcagagtattaaaggattcattagttgagaaatgcagtgcattagcagctttcatttgcttagcaaaataaaaggcacgatatgctggtaaatgtaatttaccgtgaatgaaatccttaaaactaatacctaaatcatgcaaagtttgtgccaattgttcaattgtcggttgttctgccttagctagcattccattttttaaaacaaaatattttcgcttttcttggtaggctttcaaagccgcttgaatgtcttcccagctcatcttttgatcagcaagatcgatatctaataattcattagtcaggttgatacctactccaacatccaaattaatctttattccctttaaaagtgatctaaagttagctgtaatttgtacttcgcctaatcgtttcaactcattgataccatcatctagaaaagcttgtacgacatccgagtcttcattggataaaacataccgcccatgctgataatcactaaaatatgtattaatgtgcttccatgctgcggtctctttttcaacatcgcgtcggtcctcttcagtatatccttgatttaactcgtattgtgcatccccatactgtactcgagccacacataaaatactgcctacacgataatctaatttaaacaaaaaatgggcctctggtggcaaaatagctttcaattcatcagtaccagacactaatataaactttgtttgctcaaatttaggcaaaatattatgtgcaaacttagcaacggtctttttactaaattgcatttcagcaccaggctgcaatcctaaattatgcaaagaagcaggcgtaagacctatatatttgatccatacatctttgtaatagccataatacgcatgactcccagtaattatagtagaaactggaagatcctctacactaactaaagcagatgacttttgagtttcaattttaatgtttaaatctagttgatcagttgtatatcctataggctgctcatttgagtacaactttacgccttgataaagtaaatcattaacttcatcggccacagagttctctagtgtaatgcgaccaacctgactactgtaattataataaaattcttcgtttagattacgagcatctataattttttcaataaaagataaccagtgttgactatcaatatccattttagcctgatttataggctcgttgaaaaacttacctagctttagagaagagctgtgtcgggatgcatctactagttgattaagatctttaactttataaagatgcttgttctttcctaatttaaacgtcaaactagggatgttattatacttatcaatacttgcccgcaaaataatcggctcatcattttgggtagaagcgtcactataaaattcaagtagatcttcagcggcctggttagttaaatcaaatggatcgtcatcaagatactcattaataaagtaaaacagagctaatattctaacactatctttttcaatacgggaaaaatcactatcaaatttaattgatataatttgccagcgagtaaattgcacagataatgtaattaactcattgtcctctgttactatctcccaaaaatattcatatttacgcatcttatcatcaaaatgccgacaactactaatcgaccagtgatcattaagttccagtgcctgatcataactttttttggtaaatttcatattgccaatcaaatttaaggggttaagtactgggcttttatgtgcaatcatttgcttaagatgttcagaaattaagtcagcaaaagggactttaacgttatgttcattttcttgttcgttttctactgcaagtaaagccgcaacctcgtgtttacagcgatgccctttattagcccatggacaattacagtctaactctgaagctcgaccatctaaacgaagacgaccagttacagtataagaacgacccattccgccttgaacttgagcggtaaagtgttcctgatcttgagctaattgaatattttcaaccatatcattgccataatatatttctccacgatcaaaaactcgttcaggaaataatctatgccatctagacatttacatcacgctctttcataattattactacttacactatcataattttttagttgttaataataaattgtcacaacatttttagtgagcattttattattaacaaatcatgcgatgatcttataataaaagtatagaaagtacagtattatcatatagacttatataagtatcagctaatgtaaataaaatacagaaaggaaataaaaatgactcggcaattaaaattgctgaagacttagattgctatacagaactactttctggaattacaagaaaatttcagcagtttagttatcgtaagctttatttatatgatattcaaaaaacaattcgtattttaaaaatctaccaggaatggcttttagctcaatcagatcaaaactttagcaagctttatgataaattttgggcacaatgtgaaatggatattacagccgtctctctactgcttgtgccaaacgtacatgataagaagcaggaaatagaacgcatagatcatttactcaatcaaattaatcaaattgggacatcatatttactaaatgacgttcaaagtaacgctgtaggttccgccatgaacaatgctatttatccggctaaccgagctggctagagcaaatttatcaaaatagtcaaagtgaaaataatattgaatacaatcataaactgcaaaatttcttaagtgttcattcagagccttatcctgatgcggatacattagttattttctttactaatactaaataaaagacattggccgtatttaccaatgtcttttatcatttttcgttttcattaattcttaaaggatataacctatcatcatgttctgcaggagcatcttcttcgagtaacaaatcatgattaaccaattctttctttagtcgtttcaccgtataagaattgcaatgcatgtcatccattagctcttgattagaataaataatatacatattaccgtcagcatctacccatccattggtttgtgaatcaatcattctcatcgtaagtatcatgtataggtatcatgcatcggggcttaacttcttatacttgggattatgaaaaaatgcttgtggtagcccattttgctgttccgggtagtttccgccctttttaaatttacgaatatttgtatacattttgacctcttcactttacatagctttttcctttacattaattataatgtacgcgtggtgctagttaaatctttctagacaataagccaaattataagctaaaattgcaatttccaaccggctttgaaagcctatcagactacgtgctcgattgttctcggcattgtaataggtcagaagcgaaaagtcgctttcaattgttctgcgaatagccatcaattgatgatcattgtgctttttagctcctgtcatatttttacgatatggtgtccaaagttcataacccatttgttttagctgttgatgcagttctttgcctaaatagccttcgtcgccaagaagatagtaattagatggatgggcattttccagcagttcaactgtctccttggcatcatgaactgatgcttttgttacgacataatcaagaatgtaaccgtcatcgctaacaatggcatgaactttgaaaccatagaagtaaattttcttggtggccttataaccaatgttggcataaccgcgaaaaattttagcacgatagttgcgaattggttggcaaacaggtaccggaaagctgtcaatgatcaagaaatgtccattcaggtcaacctttttattcatttcttgccgtatctgataaatcaattgcaatagctgacgtgaacgccgattaaaacgtgagtgtgataaacaattgaaacattcacagaatcttctttgtgattcaattcctgtcttagcttgccagataagtaaagccaaaatcagactgtccgtagttttaatttgatcaatatttcgccgatgagtaaactcagccggtgcatacaaacgataccagtgccgacaaattatcactaaatctttaaaactaacttgtaaatggtggctaaaacgcttaagcttaagacagttcaatcagatcagactcttttctattattactatttacaagtcgagtctaacaagattggacttttttattaactaaaacgatttaactagcaccatgcgtataatgtatatttttattagatagtaataattggacttactagtaaattatgcaggccattaaattaatcagcaatattcgcacctaatgcatttttaaagtgagccattgcccattcatcgccatttgatgtaaaagtagcaacagcagaacgtggaattgtaatttcatagtctaaattatatgccgcaatcgctgtgtgcaatacacaaatatcagtacaaacaccagttagtgtcaggtcatgaatatggcgttcacgtaaataattatctagattagtattttgaaaagctgaataacgatttttatccattaataaaacatgatcattatctttgttttctaaataccatttacccgtttgaccatatacttcacggccagcagttccaataatattatgcggtggatataatttagtttcagggtgatatggatcattttttaagtgcgcgtccatcgggaaaatcacccaatctttattttgtagaaactgtttacacagttctgtaatacgttgatcaattgcttgagcaggctggccacaagtaagagctccatcatcagctacaaagtctttaatatagtcgataactaataacgcttttgccattattttctcctttataaaataatatttaaaatatacataattaaattaattattgctaaaatcactattgatataatgaataccaaataaatccagacagtaatattaactaaaaacggtaataatgcagcgtgaaagcctagaaaagaaactaagagaagcataataaaggttataccaattaatcctaaaaaagcatatttgccactacttatatcagcctcgcttaaatcgaatccaccaaaacatagactgattactagcaataaagcaacaattgagtgccatattgaatcaaaattaagctgaaataattcaaaaatataaatccaactatgagttaagaaattccagttaagtgcattaccattacttaataactgagtagtaagctgattctgaaccaatgaaataggtgtattcaatgtacgcatgattatgtaaatcagcaaggtgcatcctaatacaggtgcaatgccaataaaagcattacccaccttttgataagtagatgtaggagaccaagtatgtttaacatagccaagtgacatatcattggtattactagggatgcgcaataaactaaccgcattaatatgatgaccaaaaattatagccataatcaaatgactaagttcatgaacaataattcctaatccgccaacaataatttgactattaaaaccaaatgtatttaccaatttttggttagcttcatggcttaattgtcgtaatgctaatacaaataaagccggaacgagtaacattaaaaaagtcccattaagggcataaagaatatgtttcatctctgatttaaatttgttttacatattgagtcaataatgttaatgccgcaaaaagctgatcaattacgccatcagttgcactgaaatcagttttaacaaactgaataacccaattatttttaattggaattaaacgaacaacttcatcttgaccataattaagccgtaaactattggctaaaatcacttcacgataacgatgtccatcacttcctagccactgtgttgtttgatcagtactttgcttaattaggctataagctttggatatttttcgcaacttattacgcagatcaaaccaggactttatttctactaactcactatttttaacatattcagataattgcatgccttcttgactttgcgcaattctttctaatgtagttaaggcaatcgccatagatttgagcgaatcaattgaaagttgcggcattaaaatttggattagccaattgtgactgaattcatcaggtggatacagtcgactaacttcaagattattttcaaaaaatacacgatatgtattcttacttaggctttcatattctttttcaccatcttgagtgcaatacgtcaaaatgacattatgtttaatttttcgaatggcaaaattatcgtctgatgaaaaaattgtactttcaaattctgtaaaatctgtcattaaattctatctttcgtctataattttatttatcgtgtttactaaaatatattgctctacgcttttttaaactagcaataaccttatcaatgtcttcatcagacattcccctgcgtttggcattgtttcgccattgtaattcactgattggagcacaactaacagtattcaaattcatccatatccagagcgataacaaactacctgcaagacctactagcacaaatgtaccagtaataaaagttaaagatcctacgaaatgtgatacgctccaaagccaaccgaacaaggttatgatatataaaataggcaaaatagctggacgatgattttttccatattcagcattcgggccaaagaaagtttgccaataacgaggtattgagcgattaattactaaatttgctaatgctaatagtaagcaaattagtacagaaacattagacttaattaataaaatactaatagctgacagaatgattacataaaatgtagcaaaattagtagaaaagaaaacccaacgtcgaaatttagcaccattgccaatgattattgcttgcttaggatttaatgttgtctggaaaaacattttatcagttgagacagtttttcgattaaagatatcaaagtgcatctaattctccttacaagcttaattttactacatttctagctatgacttaaatttcaaaaataaaagcggcttacatctcgtaagtcacttccgttaactaattttcaaaccaattccaatcatcgccaaccacgtcaactttagcatcatcggcagctgctgatctgattttttctgcttgagttgggcgttcaattgtgaagccattgttagaatctttttcaaccatgccttcaaattcaactacatcgcccctcttcaaatcaaggtctttgaaagttttcaagtaatgcagtgctaactgcttaacaattggattgccaccagcacctgcaatacgcaaatccttaaaaatagctaagcgatcgtttaatctatcaaaagtaccactaaatttatgacgcttaccatcgtcgtatggttcaagtttttcattgtaaatatctacagacatatgtacataatcttctttctacctctctaatataacattgattttgataaaataaagaggctagataaataaaaatcactctttaatccgattttaacgtatacttttaactgtaacttaggagagaaaatgagcatttattatcaatttggaattattataggtttggttctgttggctttcgccattcacatcgcaatgaaacaacataaaactacctttccattcaacattgtcaacttaggcattgcattcataatctcaacattagcaatttatattattgtagcctgtctaggagcaattcaaccgcaaaactggtacaccaataatgcattatggaaatttttaatagctagttaatcataattgagaaaatctaaaaaagattttctcttttttattaaaatacaattttatttttttattaattgattaatcgagactgtaaaatagtttgtgtaaggatgaatgattccttaaatttatttctttaaacattagaaaaaggagttcctttctcgtatgattggtttgaacaaaaaaacacatacagaaagaagaactccttcatgaatgattttaccaaagattttgctcaagctctattcaatccagacaaaataaatgatttattgcgcaaagagctacaacaggctgttaataacttgttagaagctgaattgactgcctttctgggctatgatccctatgccagaaatggctggaatactggcaactctagaaatggtgcttatttccgcaaagttgatacgcaatttggcccaattgaagtgcaagtgcctcgggatcgcaacggtcaatttcatcagcacacgctgcctggctacaagcagcactcggatatcttggaaagcatgattatcaagctttactccaagggcgtgaccaccagggaaatagccgatctaattgaaaagatgtatggcagccattacagtccagctcaggtatcaaatatttccaagcagatgattccaaaggttgaggcttaccacaaacgcaagctaagcgacaagtttttctgcgtctatttggatgcgacataccttcctttgcgccgagaaacatttgagcgtgaagcagtctatattgccattggcatcaagcctaatgggcacaaggaggtcattgactactgcattgcgcctagcgagaacattgaagtctggacagatatgcttcaaaacatgaaatcccgaggcttaaagcaagttgagctttttctttctgatggtgttgttggcatgaaaacagccttggccaggacttatcctaaagctcattttcaacgctgtttggttcatgtcatgcgcaatatctgcgctaaagtacgcgtcgacgatcgtgaaaagatcatgaacgaattcaaacaggtgcatcaacagacaaacaaagaagaagccacagctgtcctgcatgacttctataccaaatggggcaaggtttacagccatgttatcagaagcttgaaagacatagaaccagatctgctggtcttttataactatcccaagcagatcagagcttcaatttattcgactaacatgattgaatcatttaacaatgtgatcaagcgcaaagctaagcctaaggcagagtttccaactgaacagtcgcttgatgcttttattggcattcaggcaatgagctacaatgaccgttatttcaatcgaattcataaaggctttggtcaggttcaggacaccttagaatcctactttgattaaataaataattaaaaaatcaatttacgagaaagatctatttacacaaaagatttgacagtttctataattttcacaatcttagtcattaaaaataacattattcagtttaaaaacctgaagtatatggactttttgataaaagctattatctatgcttgactttacttcacaaagataagacaatgactgtgcagtatatgaaagcggatacaatataaatggtatatctatttttgaaagcatggggaaaataatggatagtttattatttacaacatatgaccaaaataaaattaatgaattacaagataaacttaaccagcttagtcttcctatcaaagtagttggtttagctgaagtagattatgcaccacaaaagtcatattctgaggcaacatttttaagtaatgctagagctacagcacatcgtttagctgaatttaccaatttgcctacattatcagaaagctcaggtctaagtgttgattatctacttaactctttaggaatcttgccttaccaccataatggtcaagatgataaagctaaattattaggctatttaggtggagtttctagtgaaaaaaggacagctagctactacactacctttgtctttacttggccaggtcaagaaagcaatgatattgttagtgctggtagaatcagtggattaattgctaagtatccacatggtagcagtaactatggttacgatgctttattcgtagttccagaactaggaaaaacctttgcagaaatgaatctcaatgagagaaactcaatttcgcaccgcaataatacattaaataagttattgtgtgatttacccgattggtgggatgctcaaaaatctgctcaggcaattaataactagctcactttgaaaattaaactggttaaataatatctacttacttaattcaataacttcttaatactaataaataaatcctaaaaaaggtaggtcaaaattgacctacctttttgtttaagctttacataattaaaaatatttttataaatcttgatccgtcttggtcaaatcactacgatctgaaatccaaacatatagcggcaaattaatcttacctttttcatcgattgcatcaacgactttttcaatcaaaaattcttgccatttctctgcaggttgcatccctgggtgacccaattgtggtaccaaccatccatttgctaatggcttacctgtagtcaaatctacaatcatgccgacagtataattataaaaatcaaaactaccttcaactacaatccaattactactattcatcaattcagattgcagcttagttaacatttccggcggaatctttccttctgtaaccatcattctgcccttaattggaccatttttcttttcgaagtcttgcaaaacacctttcataaaaagcttttgccctaattgatcaaattttgtttcatcttttaacataatcatgtccgctttctttagaatcagtatccattatactaaaatttgtttagtatcgtatcttcacttgtaaattagagtgatcacttgtgtcgtacagcgtctttagatataaccgatactcaggatggtgcttaatcaaaacttgatattctttagaagcatggattttattcaactcgctagcctttatatgattatgaccattaaagaaatgatagttcatccagccaaacaaattccccatcgccctaactaactcgatgtcttcgtgatactgatttaattcactttgcatcatatccgcagaaatactaccaagctgtagatcttttaaatacttatgataatgaactaaagtataattttccttttcctcatccgttaaatatcttgtcatatcaaaattacgccgcacatatgtaatgtgccgtgaatgaactcgcactactccatagccttgatcattagaacaaaaacttgatgtaacgatctcagttgtaggcgtcatgtcttgtggtcccataatattttgagcatgaatatgaccagaaaaagctaatttcacgttgtaacgcgcacacaaacgtcgtagctcaacagcgtcatcaactacatagcccttgttaactgctggattatgtgcatataaattatgatgcataaataaaaccggacgtaactgatgttcctgcgcataacgaaattgtttttcaatccattttaattgtacttttccaatttcgccgtgagtgtgcggtgcttctgttgtctcttcttttccataaatatttgaatccgctaaaactaaaagatattgcggattcagttggacactgtaagccaatgaattatcgtcttcatctaaggcctcacgatatgatttatcaaagatcgagcgccaaaacattgggctaatttcaccagcatagaactgttttttaccacgaaattctctagcccacccatcaaaaatgtcgtgatttccaggtaaaactaacactttagtttctttcaacggcttaaaaatttgagcaaatttctcagcagaaactcgttcaccgttaaatgtcacatcaccagttacaataattgcggcaggcttttttctttgtgccattcgcataaaagcagaaagggctatttcttgataatacaaatccttaccttgactagttttttgcatgcgtgaaaaggcttgtccttcatcatgtaaactatctgcgattaggtgcgtatctgagatcacccaaaattctgtgttaagctcttttgtaatcatttcttaccttctgttagcccaatactgatagaaatcaacccgcaaatttccgttaaatagtttgcgcttcttagtagcctttgcaccaaaacatttttcaaagttaggatctgcagttaagtaatactgactgaacgaactaagcggtctaagtacttctcccatttggcgatacagctcttctgccgactcacgatccttcaatcgcttaccataaggtgggttcgcaattataattccattttctagatcagtagtaaagtctttaactgcgatttgtttaaagcgaatatcttgcaatacacctgcattgtgagcatttaatttagctacttcaagaacagactgatcaatatcactagcccaaatcggtgcttcaagcggcttaacttcactcttagcctttgccaatacttcattatgtagtttagggttaaaccagtcaaaaccatcaaaggaaaatttacgccaggttcctggtgctatatttttagcaattaatgctgcctcaatagctaaagttcctgaaccagtcataggatcaattaaggggtgagtaccattatatggagttagttttaatagcccggccgcaaagttttctttcataggggctccaccatgctctactcgatagccacgtttaaacaaactagcgcctgtagtatctagcgaaattcgagctacatttttataaatatgaatatctaagggatattcattaccagtttctggcaaaaagccacgacgatggtactggtcaaccatcttattaacaattgccttttttacaattgactgtacatctggttcagagtgcaatttggattttacagctctaccttgaacaggaaacttagcgtcaacaggcaataattcggcccaatcaaaatcataaatctcattaaataaggtatcaaaatctgttgctctaaactcttttagcaaaattttaattcggtcagctgttctcagccaaagattagttctaactatatcttcttgaccacccttaaaaaagacacgaccattttcaacacgggtcttataccccatagactgtaattctttattaacgacactttcaaaaccagcgcccatagttgcgtaaagttggtattctttcattgttactctttcattttcaaaataaaaaagagctggacctaaaagcccaactctgcctgtgtgaatttctataagccacgttttgttccaataatctctggcaaagattaccttcagtagtcatctatctttactgcttaaagcaataatccgacctttagttcatttccttaggccgaaactcccccaccaaatttgggtttcacactcgcagggtttacctcgttccaccaaagtcatttctgaccttgcttcgtcactgtggcacttttcaggatagtaatgcatgtccgaagatttagcactttttccgccgtgaagactaacgtcctcctccagcttgttaggctgaatacgatcactacaaacatcgcagtctgtgtgtgcgtggactttcctcagctaacataagctagccgcgcctactcaaaattcacactgttagtcattatagcaaaaattaatgctttaatccataaacgtgttgttctagattataaacttttctttccaaagttgaaatccgttgaataatagccatattagtcgaaatttcaccttgagtatcatctgcatcttctgcaaacttcacaggcgcacttcttctatgcgttggcatataagtcttaaccttttcttcttcagcctcaactgttttctttgctttttgcttttcatccattaattgacgttggagcgtaccgatctgaccatacaaatcttcgataatttgttgaaaagtagtataatcagaaattacttcatctaagtatgcatcaacttcatcgggatcatatccctttactttacttttgaattgtttctttaatatatcttgtcctgataattttatatcatttaaatttgccatcttactgacaactcctttacattccaccctattttagcaaaaacaacgctgactgaaaataaagaaacagactttaataaaatttttaccatattattcagaaaaatgatttatttgatgattttcttggtattcttcagctgcatcttgtaaatcataaaaatcaattaaatctaatggatattctttagtttcctggtatttttggattaaattataatcatatttaggtttacctgggtgctctgaatcatagatcatcaatgctcgatcagtatgctgaatcataaaattttgataattacgtaattgaagtggactttgataaggggtattagaagttgaagcaaaaaagtccactttttccttcaaatttaagaatttagctttgttactatcattccatcgattagcaaattcttcatatggaatcattattgatgttcttaccggatatttttctcctaattcaagtccaacctcagctgtccactgttcgacaccgaggttagctccagtaataatccagtccaattgcccatcatccagtagacttgtcagataattttttagggcatatttaatgacagttatcttgggatcacgatcgccaaaaacatttaattcatagctgcgatagccagtcacccataaacgctgcatttgtttaagcccccctttatgttcaaaaatgtagtctttattgctataatgctaacaggagtgaggacaatggtcaaatatcctagcggtagtttagccgcatttagaaaacctgtaactaaaaaagatgaacatccagttcaccgatcatatcatcataaaaaaggtgttaacttttctgatcgtgggatgacacttgagcaacaaatcaatgaatctaataaatattatttaatggaagaaattgcagttgttcataaaaagccaaccccaattcaaattgttaaagttgattatcccaaacgttctaaggcggtcattcgtgaagcttactttaggcaagcttcaacaactgactataatggtgtttataaaggatactatctcgattttgaggcaaaagaaacacggaataaaactaacttcccattaaaaaactttcatgaacaccaaatttttcacttggacgaatgcttaaaacaacaaggaatttgttttacaattattaggttcgctagcttagagcgctactttgttactccagctagttttgtaattcgagcttggcgaaaaaaagataaaagctcaatgactttaaaagaaattgaaaacaattcttttgaaatcaaaagtggctttcgtcctacactgccttatcttaaggcggtagataaattcattgcagataggaaaagataatcatggcagataataacaataatatgaaacgagaatcacgaagagactatcatggtcgaaggccaagtagtggccacttatggattagaatcattaaatggatctttttgctgatatttttaatagtaatctctggaatcgggctttttgctttttatgccaaagatgctcctaacattagtcaggaccaattgcagagtggtaaatcttcaagtctatatactaataatggtaagtttttactatcacttggttctgaaaaaagaatttatgttaaaaataaagacattcctcagcaattaaaagatgctgtagtttcagtagaagacaaacgtttttacaaagataagttaggcgttgacccaattagaattattggttctatgttaactaatgccaaaagtaatagtattgctgcaggtggttctactataacccagcagttagttaagctaacggtcttctctactgctgcttctcaacgtactctgaagagaaaagctcaagaagcttggttagctatgaaagtccaacatgaattcagtaaagaccaaatcttagaattttatattaataaagtctttatgaactatggaaattatggcatgggtactgcttctaactactactatggtaagccactaagtaagttagatttggcacaaactgcattgattgcagggatgccgaatgcacctgttgcatatgatccatatctttatccgcaaaaggccaaataccggcgtgatattgttttaaagactatgctacaaaatgacaaaattactaaagctgagtacaatcaagcagttgctgaaccaattagtaagggacttaaatcacatcgaaataataacgagtctaagattagaaaaattgatgatccatacattaaagaggtaatttctgaagttaagagcaaaggctttgatccatatcacgataatttaaagattactattaatatcgatcaaaaagctcaaaacaagctgtacgagttagctaacaacggttctgtaccttttacaaacaataaaatgcaaattggtgcaactgtagttgatccaaacaatggtcatgttgttgcaatcttaggtggacgtcacttaccttctgttcaattaggattagaccgggctgttcaaactggacgctctaccggttcgtcaattaagccagtacttgactatgcacctgctattcaatacttgaattggtcaacagcaaaaatgattgatgacagtaagtatgtttatcctggtaccaatatccaattatatgactgggacaacaaatacgacgggatgatgactatgcgacatgcattggagcagtcacgtaatgttccagctattaaaactcttgctgaagttggagtaaaacgggcttcagcttttgctcgccgaatgggcgttaatgtttcaccaaaatctggtttatcagtagcaattggcgctaatgcgtctagtttacaaatgactggtgcttatagtgcttttgccaccatgggcgtataccacaagccgcaatttgtttctaagattgaaacaccagatggattaaccagaaattatgattcaaatggtgtacgtgtaatgaagaaatcaactgcctacatgattaccgatatgcttaaaggcgtaatcaaacgaggctctggtactaatgcaaaaattgcagatctttatcaagctggtaaaaccggtactgttaaatactctgatgaagatctagctaagtacccaagctataattcaactccaaaagattcatggttcgttggttataccagatcatatgttatgggtgtttggactggttacgataatttaaaggacggtactatttctggaataggtcaacaatctgcacagctaatgtataagagtatgatgacctacctaatgaacaataagcctaacctagactggaaacagcctagctcagttgtaagagcgaaaattgtaaataactctaatcctccagaattagcaactggtggcggcacttggcaattatttgttcgaggccataccccagccggaattggtaatagtgcagcaagttatgatgaagacgatgaagaaactgatacttcaagcgataatactggaactactccttcatcttctagaactgcagttactcaatcatcatcaagtcgtgaaaatggctcatcatctcaatccaatagcagtcagcgagcctcttcctctcaaagaagaacacaatcttcttcaacacaacaaagttcatcaacgagaaaacctgaggaagaatcacatgaacgtaatgatgattcggataatgactaggcaataattaaatatatttattaacagatagcgttttgttatctgtttttattttggccgaaacgtagttgaggcctgaaattataaaatcaaaatttagtaacaacagattatataaaattattcaataaaaaaagccgaatttatttcggctttacttttcggaatttaaataagaatacggatcgcctttagctcgagctggcattgtataacgaccaaatagaatcatcgcatggtgcgtttttatccattcacttttaggtaaaattgcttctaatcgcttctctacttcatgtggagtagctttgtcatctacaatatggaactttttagaaatccgtgacacatgagtatcaacagcaatagctggcacaccatagccttcagccaaaacaacgttagcagttttctctcccacccctggtaaggtcatcaataactttttatccttaggaacctgtccattatatttatcgaccaaaatttgcgcagtggcctttaaatgtttagcttttgaacgaaatagaccaatagtttttatctcatgctcaatctcttcaattggagcttttgctaatacttctggggttgggaacattttactaaaactaggcataacacgattaaccatcttatcagtcgtttgtgcgctcaacataaccgcacaaagtaaatgaaagttagtatcccattgcaattcaccttgtgcgtcaggatacaatgctaaaatttttttcaaaactctacgtgcttcttcatcactcaataaatcttctgtcatttttatcgattccttttcaaaaatctctcaacttcatcagttgttttcagactatgcctttgccaattaagtaaaacacgatcaatatactttaaagaatatgcctgagacaatacagcctctcgcaaagcaagttcaattaattcaggagcatagtgatccacacttaaccattgcgcaatctcttctcgttcaattggactcagatagcgaccaaattcaacttctacttttcgtgacaaataatttaacggattattttctaaattattagcaactgaaacagttttatcttttttcttatctttgatcaagacgttttgatcaatatagtgatcaagtgcattatacaacttattgagactatatttattaccaattttatcctgactatcagtcatttgttcaatagttaaataatttcgttcaattagccgctgaataagattacccacatcactaaccgataaattagtattagcagcaatcttttcattagatggaaaactctcacctcgttggctaaatgcttccaattggattatcaaaattagttcagcatcactaatgcctaattgagggtagtaagcgatcaatccattttgtaaggttgtaaagcctaatgcccgataatcattaaattccaaaataatttcctttcaaaaacaaaagttgaactaataactagtccaactttgtgtatcaatatttaattattaaccaaattaaggttgcattctgttaatcaatcttgggaatggaattgcttcacgaatgtggtcaaggtgacaaacccaagcaatagtacgttcaaagcccataccgaaacctgagtgaggaactccaccaaatttacgtaagtcaaggtaccattggtagtcttctaaattcaaaccagcgtcaagaatttgttgcttaaggatttcgtaatttccttcacgttctgagccaccaaaaatttcaccataaccttctggtgcaattacatcagcacataagtattccttaggattatcaggattcttcttcatatagaatggcttaattgaggttggatagttgacaatgaagactggacgatcatattgttctgaaatatagccttcatctggagcaccaaagtcatcgccccacttaatatcacgtccagcatcttgaagcattttaattgcatcatcgtatggaagacgaacgaagttaccttcagtagttgggcgaagtttttcaggatctctaccaagaatcttaagttcatattcattattttctagaacttgcttcaccatgtaggcaagatatctttcttgaatatctaacgattcatcttgatgcatccaagccatttctggttccatcatccagaattcagtcatgtgacgacgaccctttgattcttctgctctaaaagttggaccaaaagtaaagatcttaccataagccatagcaccggcttcaccatacaattgacctgattgtgaaagatatgcatcgtggtcaaagtattctacatggaataattgagtagtaccttctggagctgaatgcataaagataggtgcatcaaatttgataaagccttctttttcaaagaaatctacagtagccttaaacatggtatttctaatttgcataatagcaaatggtttctttgatcttaaccataagtggcggtgatcaagtaagaagtcaacaccatgttccttattaccaattgggtaaccttcattgtttgaaaccacttttaaatcagtgatttgaatttcataaccaaagtgtgaacgtgcgtcttcatgaacagtaccagtaatgtaaaaacttgcttcttgtctaagtgacttagcagcatcaaatacttcttctgatacatcattcttacgtactaccccttggaaaaatgcagtaccatcacgtaattgcaaaaagataatctttccgcttgatcgtttatctgttaaccaaacatgcatcttgacttcttcatcaacatgtttagaagaatctttaattgaaatcaattctgtcataaaatcctatccaccttttcatcaattatacagtttccataataccaaagtttctataaattatcgacttctgagatatcatttccatttttgaattcatataaagtataacctagattgccgttttgttttttgtaggccacttcccaaacgacctcacccttataccaaccaagattaatattatttattgtagcatccgtatggatagatttaaacttatttttaatcttagattcagtgattcctttggccgcaggatatagatatgcctttttagaatttggcaaataaataaagtaatattgttttcccttattattggtgcctgctatagcatagctgctagtgccgcgatctaaatgataatagttttgaatctttctaattggtgttttactagtagccaattgcgtaactttttgatcattgccccgacttctagatccagcataataaaagatagcaatgctggctagaaaggcaactattatcaaaccaattacccaactcacaaacttgattgtttgtcttgtatcatcttgtaacataattatttattttctaatttcttttttaattcttctctagtaaccttttcaactttgacaggaatcgtttgaaggaactcttgaccataatctttagtccataatcttgggtctaaaattacaaattgaccatgatcctgttctcctctaattaaacggcccattccttgtctaaaacgaatgacagctcttggtaaactatctttagtaaaagaatcgattccctgatcttccaatttcttctgccttaaacgaacttcaggttgatcaggagattcaaacgggatttttgccgcaaaaacagtatcaatcccacaatcatgaaaatcaattccctcccaaaaactatcagcaccaattataattgactttttagcaattacaaacctcttagcaattcggttattggaaccagacaatccctgggctaagatttcaaaatcttttagctgtggctcattcataatcatggtaaaaacagttttaattttttctaaattagtcatcaaaacaagtacatggtgcttatcttgaatgtcactaagtaaaatttgtgcaatagtcttttcaaattcttcactatcagggctaggcatattattaactgccagtacctgtaaatgcttttttatattaaaagtacttttaccaatatattcaaccggatgtaattctgttaaagctaactggttgattgcatattcaaaatttcgattactggttaaagtagcactgacgaaggcaatatggtcaaaacgactatagatttgttttaatacttcaccagcatcaagcattaaccagtctaaattggtacttagtggatcatcaagattagtaatcatcaaaataaagccatcttgctctaaacctttttgatcagaaagcaaatcagccaattgatagcccttttcagagtaataatctaggcgatcaatttgttccgtaatctcattgactaatacctcaacattagccagcatgcgttcttgttcattatataattcaaataaaacctgattagttaagtccctaacctcttctaatttttgttggaacttaggtaaaatcgctttaaacttgctatttccgccaaataaactttttccttgaaaactaagttctagattaccattagctaaaactgtccgattaacagcattatctctttgaaaataaagttgcttttgtaattcattaattaactgaattaattccaaaattttaggatctattttctttagtaaaaggttcagctgcacatcatcattaaattgcgcttcaacactttcatctgagaaataaagcaaattacggagatgacttaaaactccccacaaagcttcaaaacgcaaagaatcattacgcgaacttacgacattgtctgtgaaacgatgagcttcatcaatgactaaatacggattctgaccccaaattgtatccatatagtggttagccaaataagcatgattagtcaccaatatatccgcttcttcttgtcgtttacgcgctaaattccaaaaatcgacccctgcaaaacggctacctactcttgcatcccctggatgttgaatctgtgcaaagagtggtgcattatagttagttaaatttaattcatctaaatcaccagttttagtcttagtcagccaaaccagtatctgcatctgtaatatcaaggtttgcttattcggtgtaccttgaaaaatcgtctgtacaaatccgtcaaggtcaaggtaacgactacttgacttaactacttctgcagtcaaatccaacttaatcaccttaaataactgcggaatttcatgttcaatcacttgttcttgcaacactttagttggtgtagctacaactaattttctaccagaataaagctgataagcataagcaaaaagataagaaaaagttttcccagtcccgttaggtgcttcaattagcatcgcccttttatctggatcattaataaactgatgcaaatgattaattaggtcgacttgagctctacgaaagtgtaaatgatctttaaatagcttttgtttctctgagtcagtctttgggaatttagcattcccaccatgtgcttcagaattatcattttgtttttgcagaataatattacgcacttgcatatattctttacctaaaggccgtttttcttgacgtaaattatctgcaatcgttgtaatcacccaagaggtatcccgaataagcccatgagataatgaactgagggtattcagtgtagcttgaggtagactttctaatttattaaaaatttcaagcaataaaactgcagtcccataagcatcagaatctgccttatgtggatctaaatgtttaatcccaaattgtgttgtcaaatcactcaacttataagatggaaaagtcggaaaagcaatcttagccagttctacagtatcaattgctttatttgtaagtgcctcataaccatgttgcactagttcataattcaaaaaaggcaaatcaaagtcaacattatgagctacgaaaacagtattttgcaaaattttagtaattttgggtgcataataatcaaaatctctttgttttgctacatcttgatcatgaattccggttaaattaacaactgattgtggtatttcacgatgcggattgatcaaaaatgaataagttttaactaccttgagatttttaataatagcacacccaaactgaataatatgatgcccattctcacgttgcgttcctgtagtctctagatcaactacagcaaatgtatctttagtaaaactttttgccataatttcctccttcctctatttcacttcaaccgcttgtttagcatcaagcagaattaaatattttccaataacttttttttgactaaattcattgatagcttgttcatatagtctaagctgacctgtatatttttctttaatcaattcaattgattcagataaatgcgattgatcaacgtggtcagttttgtagtcaaacaaaataataccatcatttttgacaaaatagccatcaattgtaccatgaaccaaaattttggcattaggatctgaaaagtttttaaacaaagttttagcggagattaaactagaaaaatctatttctcgctttaaattctctggcttttgccaaaattcctcggcaaaattgctatgaacaaaccactcaatttggtctttctttaaactagaaacaatttctggattcagtttcttttgcttaatcaattcttgaatttctacttctagttgatcttcagcaccattgccttgataatcataatactgcaaaatcatgtgtgtagcagttccgatttctgcaccagtaaacttagtttgatacaagaaattaggtttagtatcaatcggttgtaaataacgattagtcgatgtcaataagtgggcattctctaattcggtctcgatcggatcgttgaatgctttttttatttcagataccgcttggtaagctgtagtttcactagcatctttaaacggataattaaattgataaagccgtttagtggtttgatttaaaaggttactttgcgttttatcattacttgtctccgctttctgataatcaggtagttcaccgttagcattttcataattaatatataaaaacgactgactcttatccaacgaattagtaatatcagacattttcacagctaggtgtcgatctaaagccaacgcaggtcccataaaactcaatggactagtggaagataacttatctgctaatgataattgaccaatctgatttagttcagtcgaccattctttaactcgtttatccagattaggaacatcgccaaccaaaattaatttctgcttagcccgcgttaatgctacataaagaattcgcgcttcttcttctaataattgcctttttttagttacatttcccatcgctttaactaaagagtcaatccgataatgttcttcacggagcgtaattcctatactatctgagctaatcacatagttaccttttaaatcacgcatttgatatttatgctgcatccccacataaaacacgatcggaaattctagtcccttagaaccatgaatagtcattaatctgaccgcattaccagcttctttagttaataaaggctgtgccaagtccttctgactttgccgcatccgattaataaaattgataaattggtataatcccttgaaccctgcactctcatatgaagcagcacgttcatataaagcttctagattaactcgtcgctgttcaccattaggtagtgcggtcattatctctaataaatttgtcctagcataaatgctccaaatcaattcagaaatacgatgtgccgtggcaaacttgcgcaaatcagctagttgatttaaaaaatctttgattcgagtacttaattcatctcctacacctacataagaagtcaatgcactatagaaagtagagttcttactcttgatacgaattttagctaaatccttttcaccaaaattaaacaaaggcgaacgtaaaactgaaactaatggaatatcctgatcgggattatcaatgatctttaagtagttcatcataacagtcaattcaaaagtttgaaaataattcttcgcatcagttacaaataatggtatatcctgcttagcaaattcctgcattatttccaaattatcactacgacttctagtcaagatagcaatatcactgtaacgtaactctctcattcctgttttactatcaaagatttgtacacgctcttcttttagttgcttaatacgtgctaaaaccatttgaatttcagaaaaatctatctcattttcatcttcattactgctatttttcttttcatgaacaattacttcactagctttaggagtgttttcaggataatacttagcaccaaaaattaattgtccttctttttgatagtcaatcccgccaaaatctgaacttagcacacttttaaatacttgatttacaattttggtaaccggctcagtagagcggaaattatctgacaacagaattcttttggtttgtttattatcatcattggcaaaatcatggtattttttcaaaaataagcttggctctgcttgtctaaagccatagatcgactgctttacatcaccaaccatgaaaagcgtatttttatctttatttttgatttgctggatgatattttcttgcaaagcattaatatcctgatattcatcaatcaaaatctctttgaatttattttgataaaattcacgagccatttgagaattcgatgtatcttgactcaaaatctgataagccaattgttccatatcactatagtcaagcaaattttcactgcgcttcagcttattaaaccgatcaatcaaggctagctcggatttagcaattgcagcaacaatcttttggccgcgctgcatgactttaatttgttcttgttcatcaacagcaaaaaatgaagtaaaagtatcaaaaaccaaattttttgcttcatcttttaacttttgtaggtcttcataaaaatttagaacatcttcatcccatttacttgacttacgataattcgctgtaaaaacacacgaacgtaatagttttcgttgtttatcgtagtctgcatcattttctaaagcaaaaacaaaatgatctaaattttgtgcaaacaaggtaaaagcttccttagccttagctagctcttttgtttctattactggattttctaaataatcattaattttcccttgtaagtcgccaatactagtaagcaagtatggcttaatctgtttttgccacaaatcagattccacgatactgccattaaccacgtaaacatcaaccaatttttttaaccatgagcgatactcaggtttggccatggcaaaatcatacaaatccagcaacaagtcgcgcggactatccgcatctctatcccctgcaaagttatcataaaaatgcctaaaatttacgtctttcttttctagaaactccccttcaatttcacgtaatgcacgttcttttaacaatgcagcttgagtatcatcagttagaatactaaaacttggatctaagtttacagagtaataaaagcgatggattacttctagacaaaatgcatcaattgtagaaatattagcagtatccacttgatttagctgctcacgtaaatatctgcgattagatcccggctttgctaattcagctgataatgcctgtttaattctagttttcatttcttcagctgctgctttggtaaatgtaattactaataattcatcaacttgggttcccgaaagaatctcccttaaaacgcgctcaacaagaacagttgtcttaccactacccgcagaagcagaaaccagaatatcatgaccacgatcatcaattgcttgttgttgctctttagtaaattgagacaattttattgttcctttcctaatttctctttgattttaagaattaattcttttttattcagattgtttatttcatgatattgattttgacgcagcatcgcatcaaaaaagaagacatcacgataatcagaataagttaaggcattcttcgctttgccataacgatatggattaagttcaatttttccagataaaatttggcttgatgcttgtcgaataagatactcatcgtattctagcagtaattcaatttcttcctcactaaagttgcggtcacgtggcaagctaaagccacctctagccttagttttaaccccagtatacagttcagaagaatagctaggatgatcatcaagtaatggctcagcttctactaagatttctggatcattgctgattaagccagtatacatcagcttgggcttactatcagttgctccctttttcaaatttaaactactatcaattagtttattgctattcaaacgttctaattgtctagtaacagtttgataaaaagcacccaataatgaaagacgatcttttccagcaaaaaattgatcatttttagtcaaaacatccaaataagaaaccatctgtaaagcaattccgttataaaacatcccaagatcaaattttttagctgatgacttgtaatcaataacctgggctaaaacttgatccttatcattgaaattggccaaatcaacccggtccattttaccgcgcaaatcaactttatgttgacctgatatatctggcacttttaagcttaatcctttgattttttcacctaacccaaaacttaattcagaatacttagcccgtaacggggtttccttcaaggagcgccgccaattatgagctaccttagaagtagtatggtctagacacttgaaaagatattgattaaaaggatcattcattaattgagaatattttccttcatccttcatcacatttcgcaccgaattaagcatttgttccagttctatgctgcttaaatctgctaagtcggtatgctgcttgtttagttttttcactaaacggtcaaaagtctcgtgaaaatagtttccagcctgaataacatcaaattcattttcaaaccgtcgccgcagcttaagcccataattcaagaaatattcatatgaattttcataaaaagtttccagttgtgacacagatgaattcaagttttgaccatacaattgactagccaagtcctgaccaatattttctggctggttatcaaaatcacttgcttcaagcactgtcttcgttttttgaggtagttgctcctgtgtgatttttaataactcttgcacagcaagacctgaatttattgaattcatataggttaaatagcctaaacttgcatcagggttagtaatgaaagacaaaagatcctgcatcttttctggcaaatcatgttgaacaaattgctgagcaccataatcctttaaacgttgataataaattgaaggatcaagctcttcatttgaagcattaagtactggataagatacatataccctatcttgtgctaaagctagcgacaaaccaaactgataattttggtctaagttattaagctgttgactatcttctaagtaagattctgaattaaaactattttgtagctgattcaagttttcagtagttaaaaaacctggcattttctgaatttggggtaaattattagcagtagcgccaatgataaacacttgcttatagccgctagtttgtaccatccccatttcagaaaggtttaccgcatcaagtgttgaaggaatttgggaaaaatttgcttctcggaaagcgctaattaacatattaaagaattcatttaaatcaaaagtttcaggattaattgctaaatagtcttgcaacagctgcattaataaatcccataattgctctggttgctgcgcctgctgtaaatcaccggcttcattggcctcatcacgccatttttctaatcggtcggcaattccgttcttagttaagaactcaaaaaatatcgttaacgccttttgactatctttttcttgctctattattttgaaaaatgttgaaatcttatcaaccaagtagctgcgcaaacgatcgatcttagctacttcatcatccattttgtctaagcggatcacttcagcattcacaaaattatcaaagtgttttttccataaattatgattaataccatgagccagaacaaaattctctagttcatcaacatcatgaatatactccgcctcttccttataccaagaaggtattaacaagtgtgtctttaggatggctagcatattttgtgtttgaaacggattctcatgtaagttaaataagctttcaattaaaacaaccagaggatgatacttcatttcctgttgtaaatcattaaaaaatggaatctgattttgacgtaaaattggcgtcaaataagtctcgtattcctttaaatttggagctaaaatcaaaaaatcatgatagcgatagttgcttagtgctacctgttgataaatagtccgcgctacaaaataagcctctgcatatcgagagtctgctttaactaattgtacctgcttcaattcgtcaactttaggaattgtctccgtccaaagactatttaatatttcacgaccatttgattgcgaattaagcggaaaagttgctgtcacgtagtccatctttctctcttgtaagaacagcgttaagcgcttaatagtttgctggattacataatcataatctccttcttccgcactagaattaatttcacctaagcgcgttttaaatgcaaggattacatcttttgctttacgcatcaaaattttaatcgttagtgtttcctgtaatgaaaaatgtgaaaaatcacagaaataaaaactggcttgctttaaatttttacttttagctaaaatttcatttagttgcagctgaacctcattcttagtagagaatttacccgcaatttctttaataaaggcatcatagataatccgcaaatcatgtaatttatttttagtttcttgatctaaattatcctctgatatctcgtctaaatctaaatttccgtcatagacttgcaaaattgtctgataaagctgatttactaatccagaattaacattaacattttcaaaaatagtcaattcatcttttttgttctcaataatatgagctaagagcattgcactagctgcatcatctagttgattaggcaatccttgctcggcatcttttaagaaaaaccaagctaaacgcgaaaaagacaaaacatgcaaatttttaactgcagtctcagtttgttgtttgcttgttgctaatttgttaattgccctaacttctgtggtaaacttaatatgattaggaacgatgataaaagtttcttgttctgggtgttgctgatagttttcaactgcttcttccagaattttttcttgtaatgggtcggtttgtcgtcctgtaagaattttgatcatttgttcgcactccttgctttttattttatcatagcaagggcaatcttttgtataaatctagtttaaggatgattaaaaatgaaaagcagctatttagctcatggcaaggtaattattattggggagcattcagtagtttatggatatgatgctttagctatgccaattaaggctttacacattaaaactactgttgaatctgcttctcaaatgtggatggataccgctcgctaccacggtccattatttgaagcaccggcagaatatgatggcctaaaatacgtagttaaacatatgcaaaaaaaggctggcaataaccatccacttaaaattacatacactggtgaaattccaatggaacatggttttggttcaagtgctactgttgcattaggtaccactagggcaatgaaccaattctttcagctgaatatgactgaaaaagaaattatgactgtaactaatcatgctgaaatgatcaatcatggtaaagcttctggtcttgatgcagccactgttaattcagattatctagttttttttaataaaaaaatggggcctaaaatattacaaaccaaattaggagctaccctgttaatcatggatactggtcaactaggcaatacaaaggaagctgtttttttagttaaaaaaatgcttgaaaagtccgactatgccaagaaaaaaatagctcgcttgggtgaattagcggatcttactaaaaaagcttggatcaagcacgatcgtcaagcagttggacagatttttaatgaagcacaagaaattttgcactcatttgatctttcaacaaataaaattgaccaactgcaaaaaattgccttgtcaaataacgctttaggctttaaattatcaggcggaggtcttggcggcattactatttccttgtgcgataacgaaactgtcgcccaagaaattgcctctaaatgtaaagatttaattagtgactactggattgaggagatttaatgaatagaaccgcacgagcacatacaaacattgctttaatcaagtactggggcaaagctgacgacaaattacgtcttcctttaatgtctagtttatcaatgactttagatgctttttatactgatactagcgttgaaaaaacagatggtgaaaatcaatttttcttaaataatcaacagcaaactgctgcagctagtcaacgtgtttttgcttatctaaaaaaattgcaggctcgttttcacgtcactggcaatttaatcgttaaatctgtcaatcacgtccctacttctgcaggattagcatcatctagttctgcttttgcggcactagctgctgctttttgtcaatgctatgacatcaacattgatctagaagatttatctcgtttagccaggattggatctggttctgccagccgctccgtttatggcggttttgctgtttggcaaaaaggtaatagcgacgaaacatcttacgcatatgcactagatgaaacaccaacgatggatcttcaccttttagcagttgaattaaataccaaacaaaaaaagatttcttcgacttatggtatgaaagatgcccaatcttctccatttttcaggccctggcttgaacgcaacaattcagaattaaatgaaatgatcaaagctataaaaagtaatgatttcactgccctaggccagttagctgagttaaatgcaaatgaaatgcatgcaattaatttaactgcacagcctgaattcacttactttgagccgcaaaccattcaagctattaaattagttgaacaacttcgtactgaaggaattgaatgttactatacaattgatgcaggaccaaatattaaggtactttgccaattaagaaatagcaaagatatcattcaacgcttttcgtccgaatttaataatgttaatatagtgaatgcaagttttggtcctggaattacttatttggactagttgtaattaaaaaagttaattagattcgaggatttagttcttttgataacagaaaaagcgcccggaaagttatatattgccggagaatatgcagtattagagcaagattgtcctgctattttagtagcagttaaccaatttgtacgtgtgtcaatcactaagagtaaaggggcaactggcttaattcactccaagcaatactcacaggattcgattcattgggttcgtcagggctcaaaaatggtaatcgataatcgtgacaacccttttgaatatattttgtcagctatttcatttactgaacaatattgtattgagcaaaatatcaagatgaaagtctatgatttacacgtcaattcagacttagattctgcagatggtaaaaaatatggtttaggttcaagtgcagccgtcacagtagctacagttaaagctatcttgcgtttttatggcgtaaaaatgagcaatgaactggtttataaattatcggctatttcacactattcagttcaaggaaatggctcagctggtgacattgcagctagtgtctatggcggctggttagcttaccaaacttttgacaaaaaatggttaaagcaagaattagctaataagactttagttcaagtcgttaatgaagcttggcctggcttaaaagttgaattactaactcctcctaaagatatgaaactgatgattggttggagtcaaaagccagcatcaacttcacgcctcgttgatgaaactaacgctaataaggcggctttgaatatggaatataaaaatttcttagcagcttctagagcttgtgttttaaagatggttcaaggtttcgaagcaaacaatattgctttaatcaaacaacaaattcgggctaaccgtaaattgttgcagcactttgccaaaattaaccaaattgccattgaaattccacgtttatcgcaattaatcaaaattgcagaaaattttggtggagctgctaaaacttctggtgctggtaatggtgactgtggcattgtgattacagatgctaataccgatgttgaagcacttgaaagcgaatggcgccataatggaattatgcctcttaattttaaggttcaccagattatcatggctcattgatggagagttctatgtcgattagatctgaaagaaaagaagaacatctgaagttagctcagatgttttttaataaagaaaaatataatagttttgatcaactgcatttgttgcgccctgctctgcctgaaacaaaagtcgatccaactattctgggatcagaaatgtttggcaaaaatgtttctgcgcctttttttatcaatgctatgactggtggctcagctgcttctaaacaaattaatcaagcattgggacaggttgcccagcagcaaaatattgccctagctttgggatctgccagcattttagctaaggaaactgatcaactagacagttttatggttgccagagcagaagatccagatggtgtactaattgttaatgttaatccagaaacaccaatctctgcaattaaacaaattatccaagaattaaatgcagatgcgcttcagatccatttaaatacaatacaagaaattgccatgcctgaaggtgatcgtgactttcgttggcttgattcaattaaagcaattcgtaccgctatcgatttgcccattattattaaagaagtcggttttggattggatcaaacaagtattcatcttttaaaagtaaatggcattgaatacttcgatgtcgccggttcgggtggcacaaactttgcccagattgagaatgcacgtaatgccagtgacgtttcatacttagaagatttaggtttacctactgtggtgactgctctgatggcatggcaagagcaagttaaattttatgtttctggtggagtacgtaatcccctagatattttaaaaggtttagctctaggaggaaaatttgttggtatttcaaatgtttttttacaagaatacatccaaaatggtagtactggattagagcaattaattactaattggaaaaatgaattggctgctttaattgctgtttacggcaaaaaagatttagcatccctggtacaaataaaaaaatactataatttaccattaaaggctcaaatcgatcagttactgtaaagtaaaagcactagttaatgattactagtgcttttactttacataattttccttatttaatttcaagcaatttagcaatttctttttgaacagcactttcattacttgaaccaataatttgccctgcagcttgtttggcttctggcaacgccgttgcagtagcaaaactacggcctacatatttcagcattcctacatcattaccgctatcgccaaaagctatcatctcacttgatttgatccctaatttttgactcaaatatgctagacctactgccttattcattcccttagtttgcatatcaatcgagtctgctgcaccagaaacaaaaccaacctccggatatttttcttttaattcgcgcaaaattttagacattttatcttctggcactgtcagactgaccttgaaaatctgatcatcaatttctccaaaagaatctactacagtaatatgctccatgtattttttcatttcttgtttataagctcgtccactgctctttttaacataagcacttactagccccatcactacagctggatatggatattcagtagttatttttaataaagtttgatatatgtcatcacttaacgagtcaacatgcaaaatttgtcttccttgagcaactaatgccccattttcagctacaaaataaattttatccaaaacctcaggaaaacgagtcattaagttagcatattgattgccactagcaactacaaatttaatcccctgcttttgcatttccgcaaattcacgcaaaaataattctttatcatagtctttctggtcagttaaccaggttccgtccatatctgtcgcaattagttttatcattttctcaatccctttgggtaaaagttcttcaatacttgattaccagcgattttgccaaaactaaatattaatttttgatagctgactaacacaaagccccgcaaatcactgtccactttaacggtttcaccgtgcaaataattttggtattcttcaattgtcggtaaatcataaacccgttcttgctttaccttacctagcacttctgccaattgatgtcctggttcaaaacgttttttctttaatatacccaactcgactccattattaattacatgaagcttacttttttcaggcaaactgattgcaggaatatagacatgttcattacggacttttgctttattacgccagtcacttaaagcaactggtaaattaaactgatccattacctgaccaactagttcctgatcatttttggttaagcgccacggatcacgcttggcttttttgtttttgctctttttttcaattctagctttacctactttttgtaaaactgccacaaattgtccttcacctataccatcttgaggccaaaagcgtaatgttttagtcaaatcaggattcccatcagcccactcaggctgtccaacatcaatcttattagtttgtatccctgtatctaaaattgtaaaaccatattctttatttaaccagctaacaatctgctcatcctcttctggtgcaaaggtacaagttgaataaattaagcgtccgccaggttgaagcatcttaacagcttcattgaggatctctttttgacggttctggcatgttaaaacatagtcttgagaccaataatcaattgcctccggattttttctaaacattccttcaccactacatggagcatcgactaaaatcacatcaaaaaattccgaaaaaattggaactaacttttctggactttcattagtaattaaggcattactgatgccccaacgttcaatattttcccgtagtgcctttactcgtgttgcagagatttcattagctactaaaaggccctcacccttcaattgttctcctaatgctgttatttttcctccaggcgcagcacacagatctagcacgcgctctcctggccgaacaccactaattgccgcaggaaacatagccgctggatcttgagaataaacactaccgcttacccactcaggatcttcccccgatacttcaccataataggctgaatttatttgcggtactgaatcagtaagctcatatgaaaccttagtaggcttcaatgtattaattctaaaagcttttttgctctcttcattcatcgccgcaaatagttcttgtgcttttttggtacctaataatttttcatatttagttttaaattcatttggtagatttagcaattttcctgtcctttctcactaagtaatagaccatcccacaaaacgccaatacaattacaacccaggaagctattaatgtaactattaaagaaccatatgttgaataaaaggcatgccatcttaaaaagaagtatgtagcaagggcaaaaatagcctctattaaaaataaacgtacgctgcggttaattacccaattgcgcagcaaatcatcgtgtagacgtgttaaacgagcctgacgcttaattcctattgcaagcaacatatttgtgatcattccgaccaataggcaaacaactaacattaaaatatccggcacgacagataaacgatctcgatgatgctcttgaacaaaagacggaatatgcaaactagcatgataatgcttagcaatcttttcaatcactgcaggtgttgcatctactacaattcgataattcttgagctggtctttagcagttggctgatcaattcctgtacttagataatatttatccatttctacctgtggatagtccttaaattcgcctataacagaataataatttttgcctaaaataacatatttattattctgcacatctaataaattaagtttaactgttggccccagcaccacaaaagaaacctgtcctttaaaatcatcaggcgaaaaatagcgaccactctcagttggcaagccagtaacggcatgattagcccaaacaagcacttgttttttttcataattattatctagatgcagttgaatttgatgattcgcataatttttgtccaaatattttaggaaagtactaatcttatcatcactatctgttctaaaatagcgggtattattagttaagccgtgtgcttccagcaattcgtcagcataattagattcaatattggagagcattgttccaattcctaaaaaagataataaaagaatcagtaacaaaaatatctttttaaaattcattttttatttcaaatacctgttcattaataaaatcgaagctttgcaaggaatgattaatctcgtctaaagctgcactatttttaaaccaattttggtgccaaaattctggtgaattagtagcaccatctttttcaccaacaaagagcaaatgacaacttggattatacttatgccaagctgccacagtttctaaatctccgtgaccgaaatttggtgaccacgaacatagaactagattaactgtgtgatacttcttaattgcttggtcagctggtaaatcttctactggataaaaaggcttagctccagtggtcgacgtcttggcccactctaatgagtctgtactgtgaactttaattccaacctgagtcaaagcttgagaccaatacgcgttgcctgccatgatttctaacgctgtttgtacatgcagcttatttttaattaactgcgcagtatgaatattaggcagagaccagatgccatatattaaagagagatattgccgaaaattattaagtaaattatttaaatcccttaaggccccttctttatctggtcccacctcaactaaaacttcttcaaattcatctggcaataaacctaatctgcgtggtgcccgcttcaatggcttacctgcttgtacataactatcaattaatgctatttcttcaacttgtcgtttaaccgcagtatgatttatctcttgctctaattttgttaatttcgtcaaaaattttgtcatacttaaacaccttaatatgattttaccattcaacggcggagaattcagttataataagactagcaagcaaaggagatattctatggttgaaaccaaaaagagaaatgatgatgaaagcattggccgctttgttttagacataattattatgtttgcaattttgatgggaatttactactttatttttagttttttcctatcaaatgaaacagtatctggtccatcaatgcagcccacatttgagaatggcgatcgtttgattgctgtacgtcattttacgcctaaacgaaatgatatcgtcattctaaaagcaccagaccaaaaaggtgctctgtatatcaagcgaattattggtacacctggtgatatggttacttctaaaaatgataagctttacattaacggcaaacaaattgcagaaccatatttaaataatggctaccaaagaaagtcacataaattaggtgaactctatactaacaatttcactttaaaaaagcgagtacctaaggatagttacttcgtcatgggagatcaccgcgatgtttccaaagattcacgttacttcggttttgttaagcgcagcgcattagttggccgagtcgtcttcaggtattggccatttacgcaatggaaaacattttaatcaatgaaattgcaaaaaattttattttttattccaatttgattaaaattagagggtaaggagaaattattatgaatgagcaagaagaattatctgatgcaattatcaattttcaagtaaaacaccatgttaatgacactgacctagcctttgctagtcacctctcagttgaaaaagttcacgccatgaaagttggcgatggacaattcacagccgaagaagtaaatcagctttatgattacatgtcagcaaatgcttagttaactacaaaaaagagcttcatttcttgattgaaatgaagctctttttttgcattaattaatctatttttggttcaagatatttcttcacgaatactagattcaaaataccgaaaacaaggctaacaataaacaagcataaatcatctaaccagattggatcggttgcttgtaaatttggactcttatcaacaaagccctgtaacttagacataaagatcatgccgcagtaagctgcgacaattaccaaaattgcgataattaacaagcgagcccaaactgtactcttaaacggcaagaaatcagtaattactcgcgaactaaaattggcaaagctgacaaagaagtaaatgattaaaattatcaaaatgataaacaaccaatgaaaagcaagcattcgattgctagttatttcaacgccgggaactgttttaattggatacagaccaaactcacgaaatgcttgagcaaaactgtctgccccgcaactagggatcagcaacagactattaacgatttcttgcagcaagaagaaataaccacatgccagcaaactgctaaatatattagctaagtatgtttttcgttcatcgctagctgctaaatgccaggtttgactcagattaattttttcattttgccaacatgtaatcgcacaaaaggcaaaatcaatgtataaagtcacatagacaaaattattgcgccagaattgccctaaatttttagacggcagatttgctagaccattccaatttttgaaaagaagaaaataacctgataaaaatactacagcaaagatattaattaagaaaaccaaataaataaattttcttttttgcgtccacatttgcctaaacaaggtccaaaaattcgtcactatctacccctccccttcaattaacgattaattatcttaggttcgacaaatttactcattaagtagctgtcgattgctcctaaaacaattgctcctgcaaagtactcaaccactgaaatacccaatggatcatatgctgcttctttggcaaaacgatgcaaatacatagcagtaatttgttcgtttagctgttcagcaatcaagattgcaataatcacaatcactgccatcacaaataacttaatgacaatattattgttaactggcaattgatcaacaattactttcgtcaaaaaattagcaaaactgacaaaagtcataataactaaaaccgttccagttaagaacaatagaaattcaattaataaactagcatctgcccaagtaactttagcatcaactaagtcatgaagcagtgaataatgatgacttaaattatcaatcatagcagcaacgaagcctaaaatgacttgaattacaaaaatataaatacattcaactaaactagaaagcatattaatcagccagattttgacacttgaagctggagctagctgccaagtttgactgaggttgattttttcattttgccagcaaagcagaccaacaaaaatcacatcggcaatcggcgtttcgagcattcctgcactaagcaaacgatctagccaattactgtccttactaatgttgagataagctaaattgcttttatctaacagagccattaccagcaaaaaaaggactgcaaaaacttgtaataacaaaactaagttagcgtagcgccttttttgcacaaacatttgcttaaacaaggtcttaaaatttgccataaaaaactcctaattctgttttgcttctacgaatttattcaaaagcaagatatcgatcaaagtaatcacaacatcaaagaccaagaattgaagaatcgtagtggcatagttaatatcctggctgttgaccataaaaggactaaactttcctaagactgaaaagataattgttgccgcatggcctaaaatccaaataatcgcaataattacaattactctaataataaaggtccatactttacttgagccacctggcaaaaaatcaataatgctgcggcttgctaggttaagcaaacttacaattgcgtaccaagcatagccaataaaaatgattagcagcaaacttccgagcattgtttgccagtctcttgctgaaagatggatgctagcctgacctattgctttgcgcacatcttgatcagacaacatcggcaaaagggtaacgattatcgtgaccgcttctaaaattcctaaccaaatataagttaaaaatgctgtcccaaaattgctaagcaaaaacttagtatcagttaccggaatcaagcgccaagtttgactgcgattaattttttcattcttgattgaagaaataatccaataaacaaaatcagcgataaatgacgttatcagcatcattactgcaaatacagcgagaaaagcaacaatcacattgacagaactagtatcttttccattaacaaattctggtgtaccattttccgaaacaaaaccaataattgtaaaacataaactagcaaaggcttgaattaagaagattaaatagactgacttgcttttttcttgaaacattcgattaaacaatgtgttaaaactagtcattattcatcatcctcatctgcataaaaactttcatagtattcttcgattgacttatgcgtttgacgaatgtcatctgctgacttgtgttccaaaacggtatgatcttttacaataaccacttcatcaagcaatgatgaaatttcattgacaaagtgatctgagattaaaatcgttgccttttcatctttccacaaaatgatggaattaataattttctttcgagccattgcatcaatcccaccaaaaggttcatcaagtaaatacaaatctgctttacgagcaaatgttaaagcaataatcaatttttcacgcattcctcgtgataactgactcaacttcatttcaggatctaatttcataaacttacgcagctcatcgaattcattctcatcaaaatcttgaaaaatcgttgcgtaaaatttaaccacttccttgatctttgttgaatcgctgaagccagttaaaccatcagtaaaagacaacttagcctttctttctgcctcttttgttgccccctctaaattaatttcgcctttgtaattcttagctacaccggcaataattcgcatcaaagtggtcttaccagcaccattttcaccaagtaacgcaacaatcttgccaggagctaaattcaagttcacatcttgcaatacttgcttctgatttttcttataacttacatctttaatagctaataaatcattcattctgatccccaccattttttaaataattctctaacgttgaaactaactcgttctttcctattccaaactcttccatattttgaacaaactgttctaattcattattaattaatgactgcttggtttcggataatagtttagtatcttcagtaacaaaattaccttcgccacgtttagtataaagaataccttgactgttcatctgttgtagtgctctttgcacggtattaacattaacggttaattctagagcaagttttctaacagaaggaatcttctcaccagctgttaacttgcctaaagcaatttgacgatacaagtattgttcaatctgaagataaataggaatattatctttaaattccatttactcagctcctattttgtactgtattattaatctattacactaactataatacttactttagtcactttttgcaagggctaagtttaatcactttgtttcacaagttcataaaagttaaaagtacaacaaaaagatagtctataatcctataatgacggtaattataaactatcttttatttttaatagtattagtgcataatttttatttattaactatgtttaccctatttcctaatctatcaataatctcatattagatcagaaatagaattattgatatttttagtcaaaaatgtttcacttacttagctctttcagcatttaattcagccattttgatcatcacgtcaacagctttccacatagactcaagaactgtgtattcataacgaccatgcatgttttcttctccggcaaaaatattaggacatggtaagcccatataagtcaattgtgagccatctgtaccaccacgaaccgggtcttcattgacttcaagaccttctgctttataagcatcgcgcgctaagtcaacgatgtccatatgtttctttaattcatcggccatgttgtaatattggtcccacattttaagtgtaattcgttcagtaccgaattcatcattcattttcttaacgattgacttaaccaaattcttccgctcttcaagcccatcacgttcaaaatcacgaataatgtaatctaagtgagcattatcaacagtaccagcaaaattcattagatggaagaaaccttcgcgtccatcggtatgttctgggcgatcgtgttctggcagttgattatgaaagtcaattccaacttgaattgcattaatcatttgccccttagcaacagctgggtgaacattaactccctgaatatcaagactaaattgtgccgcagagaatgtaccccaatctaacttaccaggagcttcaccatcaacagtaaaagcaaagtcagcaccaaagtcttcaacatcaaagtgttcagcaccagtaccaatttcttcatcgggagtaaaggccaatcgaatcttaccatgcttaatttctggatgattcattaaatattccgcaaaagtcattaattctgacacaccacacttgtcatccccaccaagtaaggtatcacctgaggccgtaataattgtttgtcctttataattcttcaaatgtggaaaaactttaggatcaagataaaactctgaatctcctaattgaattttgctttcgccatcataattttcatgaatctgtggtttaacattttctgaattaaagtctgccgtatcactatgagctaaaaagcccattactggaacatcataatcaacatttgacggaatttcagcgattacactaccagcattttgattgtagtgaatgtcacttaaacctaattcttccaaatctttcataataacattcttttggaagttttcttctctttcagttgatggaaagcgatctgaatgttcgtcagaacgcgaattaactttaacgtactttaaaaatctaggtaacaaattaggatattccatatataactctctttctaattaaaataagtcttgaaatggattagtagaaacctcggaaagctcaattccaacattccagttattttcttcattccactttttaagtcgaccatagaccttgtacttaaatagtttttcagtataatgaccaggatcaacaacagttaaaccagatgaaatcatatcatggcctacatgataataaacatccccagtaataaaagcatctaaatggtcatctaaggctctagtccaatatttaccaccatccccacaaataaatcctacactggtaattggcttttcattgtttgcagtaatcagacgtgccattttaatttgcattttttctttaacataataggcaaaatcataagcagtcattgttctaggtaactttccttttctacccatagcaattccatcatcatccagacaaaatggttcaacatcttgcagacctagttcctctgcttgccaatcagcagatccatcttgggctttatctgaattagtatgaattgaataaacagtaattccattcttgataatattgccatacattgcgttttgtgcattcgcaaaatccaaattttgtgctggtctaaacattacaggatggtgactaacgatgaaatcaacccctttttcaacagcttcttcaactacctggggacgtacatctaaagtagtcattactttggtaacatcagcctccattgatccaatttgcataccaacaggatcaccttgtgaagcaatgttttccggaaaatcttgtcgcaaacgcgcaacaatgtcttttactttggtcatttctccaattcctccttgattaatttaatatcatgatctacttcattgattcgatcttcgtctttttttcttgctttattcaaattaaccaggaatctttgataataagcgagttggccttcccatttctgataaaaaactggattcttttcttgtacaataaaggggccaaaaaagatttccttttcagtcatctcatgcttttcttcagttaagctagccttaattaattcataagtatgcccagcctctgcaattaatttttctgagataatcttataattatgcatcatcagccaattacgtacccctgcttcgcctatattaggttctagtaccagagttttaaattgtgcatctttgctccaagctctatcaagaatatcagtcattaacttgccgcccattccggcaatcacaactgtatcaatctgatcagcatgagtaacggtttctaacccactacctaagcgagtttcaatttgctcggttaacccagctgctgcaatatcatttttagcattttcaagagggccctctgcaacgtcactagcaattgcataatcaattttgccattttttactaattcaattggcaagtatgcatgatcagttccaatatcagccactcgactgccaggatctaccatctttgccaacgtatttaatcttaaattcatgtttcctccataaaagatatggttaaccaaattttagcatatttcatagtcttattttgctactatttgatataatcgtcacagaaagcgggttttttacatgagtagaacagaaaatgtcacattaactaatatgtgcatggttaaaaacaaagatcaggttttagttcttgatcgcaacgatccggtctggccaggacttacttttcctggtggtcatgttgaagcgcatgaatcttttcatgattctgtcgtcagggaagtcaaagaagaaactggattaacgattagtcatcctcaattagttggtgttaaacaattttatgatcacaatgatgaacgttatttagtatttttctacatagctgaacaattttcgggtaccgttaaagaatcagacgaaggtaaactaacctggatgagtgctaaagaattgaaaaagcaaaagttagcttacaattttgatcatgatttaccagtattttttgaacaaacaattagtgaacatatgcttgacggaaagcgagatgagctattttaatgaaaaaaactgaaagtaagtttgcacttttagctgctttaattgctattttagcttttgcctctattcccttatggcaaaacaatctgaatagtttacgaccacaaactcacacggttaagaaaaagaagactgctaaaaagaaaaaagtcgttcatcttacttggggttacccttttaagaagctctatgaaaagaaaatcaaatttaaatctggacaaaagtttggtgaaactgacgtcattcgtcgagtctatcctagcaagagttattttcatgatggctatgacttcggatttagtgaagttggacattcttccgtatatgctgtgcatgcaggaactgtccatcgtgttaaatacgccccaggtttaggactttatatttggattatttccgatgatggctatgttgaagtttaccaggaaggcttcctcagtattactgatatttatgttaaaaaaggtcaaaaagtcaagttgggacaaaaaattggtaaactgaccggctctcacattcatttaggagttactaagacagataaagattacattgataaaaagcatgacaatacgccatgcaaatactattggaaagataatggcacttggttaaatccaatgaaaatcattgaagataatctaagggcagcaggtaaagatccagtccaataaaaaagagctaagtaaaacttagctcttttaatatagataattataattaatccatgaaatcacgtaattgatttgagcgacttggatgacgcaacttacgtaatgccttagcttcaatctgacgaatacgttctctggtaacaccaaataccttgcctacttcttccaaagtacgggtacgaccatcatcaagaccaaaacgcaaacgcaaaacattttcctcacgatcagttaaagtctcaagtacttgttcaagttgttccttcaacatttcgtaagaagcgtgttgttctggactagttgcatccttatcctcaataaagtcgcctaagtgtgaatcatcctcttcgccaataggtgtttctaatgaaacaggttcttgagcaatttttagaatatcacgtactttattggttggcatattcatttctgcaccaatttcttctggtgtaggttcacggcctaagtcctgtaacaattgacgttgtatcctgatcaatttattaattgtttcgaccatgtgaacaggaattctaattgtacgtgcttggtcagcgatcgcacgagtaattgcctgtctaatccaccaagttgcgtaggttgagaacttaaagcctagacgataatcaaacttatcaacagctttcattagtcccatattaccttcttgaatcaaatcaaggaatgacataccacgtcctacataacgcttagcaatagaaactaccaaacgaaggttggcttcggctaattcttgctttgcctcttcatccccggattcaattcttttggcaagagcaatttcttgatcagcagtaagaagtggtacacgaccaatttccttcaaatacatccgcactggatcgttcatgcgtacgcttgatggagcagacatatcctttaattcagccttttcaacatccttttgtttctttaaggctaactttgaaggatcaccgttttcatcaacaatgctaataccattatcttcaaactcttgtactagttgatctacagccttgccttgtaagttataaggcttaatcaaacgagcagtgaaatcttcttcagtgatcgacttatctttctttacgtcttttacgacttgcttaaccatcttatccaaagatagtttttgtgtagtttctttttctgccactaaaaagcctccttattaacctaagatccgttttaatccaataatctcctgagtgattgcaataattccttgtgcatcatttttgcgcttagcatcctgtaattgagcttgaagctcattcagcctggaatagatgttgcgtctttttaatgctagaaccaaagcatcaacttcttgaattgtagaatcttttggcatctgtgccatttcagcatctactattataccttgaagttgctcaggaataaaatctaagaacccatcaatttgtggattttcatgagtttccgcatattttaaccaatcctgtgccagagtttcaaaatcctgattaggaaaatgaaattgcccttctaacatatatttttgagcatcagttgaatgaataaataaatacaagagtctggtctgactaggatttttttcaactactgactgctctgtaggcacgtcttcatcaccaggtaaaggtacgtctatcggataatcaggtgaatttctttgagaattacgtacatgattgcgtgcccgattatttcgccgtctttctttagcaagatttgcctttaacgaagcaatagaaaccccactagacttcgccaatttttcagtatacatatcttgctcaactggattgcgcacttgtgcaatttcttttacggcctcacctaaataagcaatcttttcacggtcattatctaagttatatttttgttccaaccgttttaagaaaaagtcagtcggcgttaaggcacctttgacttcttccagatacttctcagcgccatattttttgacgtattcatcaggatctagtttttctggtaaaactacaattcctaaattaaaattgccatctttattaaacatacgtgcagcacgttcttcggcatggactcctggatcatctccatcataattaataatgatattaggagtaatacgtctcaacaaatatatttggtcatcagttaaactagttcccattgaggcaattcccgatttcacccctgctttatatgctgcaattacatccatataaccttcatatagaactaagtgaccttcaccacgagctgctttctttgcttctgcaaagtggaataatacctttgacttggtaaaaatccccgtttcaggactattcatatacttagcttcggtcttatcatcagaaattcgtctaccagaaaagcctatcgttctcccattttcattatccaatggaaacatcaaacggtcacgaaaacggtcgtataactgcccatccctagcttgaacaaataaaccactttgtgctagatcatcatcttgataacctttactacgtaaataagtaatcaaaacattatcagccttaggtgcatagcctatcttaaaatggtctaatatttcttgatctagttctcgcttttgagcatactgcatcccccgttcaccggctttagtagtcaaaagcacacgatgataaaaatcaacggcatcctgatgcatttgcataagtggatttaatttggtgccactattatgaccatatccattaggcatagcaatatgggcaaactcagctactcgctcgacgctttcgggaaaagttaaatcatccttatacatcaagaatttaaaaacatttccacccttaccacaaccaaagcacttaaaaaactgcttatcagcatttacagtaaacgacggagttttttcttgatgaaaagggcaaagaccaatatagtctttgccttttttctcaagcgaaacgtactgactgataacatcaacaatattgacgttactgcgaacctctgaaataaaatcttcaggaatccgtccagccatatgaatcaccctttttctatctaaattaactacttaataactaacttgcttaagtcacctaaacgatctgctaattcattaactgcatataattgtgctaatcggttattcttgaccttttcgtccttagccatgatcatattagtttcaaagtattgatcaatcactggttgcagttgaacaaaaccttggtagagatcagccaaactttcaatatcttgcaagttttgaacgccagcgtaaagttctttttcactgttatcatcaaagagactttcatcaacagcagtattactcttaaatttagccttctttaagatgttatcaattctagtcaaactctcaactactggcttgaattcttcatcatcatggtgaagttgcaatacagtagctgctgctaaaatttgacttggatcttgttgacttgaagcaagaacagcatcaataatatcatacttgaagtcattcttttgtaagtattgcttgacacgatcacgaatgaagtctgcaatttcctggtcagcatcactcttaggtagcttagctggagttacaccattaagcatactaatgatttctggtaaaacttcgttaaatggtaatgaccacttctcattaagtaagattcttacaataccatatgcataacgacgaagtgcgtatgggtcattagatgatgtaggaatcattcctgcaccaaagaaggttacaattgtatcaattttatcagcaattgataataatgaaccaaccgtagtttcaggaagtggaccttcagcagtggcaggcatgtagtgttccttgattgcaactgaaacttcttcgtcctcacctgcaagacgagcataatgcatgcccattacaccttgaagttctgcaaactcaccaaccatttgggtaactaagtcaaacttgtaaagttcactagcacggtcgaaatccttgactacattctctggtaaatcccaacgcttagctaagtaatcaccaatcatgcgaacacgttgcatcttttcagccattgaaccaatcttatcgtggaatgaaacattcttaagacgatcaacaaaatgactaagtggatacttgcggtcttcatcatagaagaattgagcatcgtccaaacgagcaactaaaactttttcattacctgaaataacattatcaaggtaatctttatttccgttacgaacagcaataaagtgattaattaacttaccagtttcatcatagacttcaaagtatctttgattgtctttcattgaagtaatcagcacttcatcaggaatcttcaaatacttttcatcaaatgaaccagcaaatacagtcggatattctactaaataagtaacttcttctagtaaatcacgatctggtttaacttgccagttgttcttcttaactaattcattcatttgacgaacgatcatatctttacgttcatctgcatcagcaattacaaattgatcttttaatgcatcttcatagtcatcagcattggccaaaacaactgaatcgcctaagaaacgatggccttgagttttacgacctgcagtaatatccaaaatcttaacgggaattacatcactgccaaataatgaaacaagccagtgaattggacgaacaaactcaaaatcatttgaatcccaacgcatcttagtagggaaagtcatcgccttaatgatatcgctcataccaagtaagatatcactagctttcttaccttccttttgaacgtgaacataagcgtattcagtacccttaagttcttcaaaatagatatcgtctgtagtcattccttggccacgagcaaatccttgagcagccttagtccaattaccatcttgatcttgagcaatcttcttagctggaccttttttaacttcatcaatatcgtcttgcttttcagccaaatcttcaaccaaaatagtcaaacgacgtggagttgaaaaagtcttaatatctttaaatttcaagccattttcttttaaaaattttcttgttctgtcagctaattgcttaacgctgcgtggtacaacgtgagctggcatttcttcagtaccaatttcaaataaataatctttagccattttctacccccgcctttttgtcttctgcacttttaagcaatgggaagccacgtttttcacgttcttcgacaaatttgacagcaacttcatgcgcaagatttctaattcttgataaataaccagcacgttcagtaactgaaacagcaccacgagcatcaagcaagttaaaagtatgtgaacacttcaaaatgtaatcatatgctgggtgaaccaagttcttatccaataaacgcttagcagttgcttcataaatatcaaagaattgaagcaattgttcttgatttgattcttcaaatgcatatttagaatgttcatattctggttgcttgaagatatcacgataaagaatgccattaccccattcaagatcaaatactgagttaacatcctgaatatatgacgcaaggcgttcaacaccgtaagtgatttcactcatagttggcttaacatctaattcaccaacaacttggaagtatgtgaattggctaacttccataccgtcaagccatacttcccaaccaacaccagcacaacccatagatgggttagcccagttatcttcaacgaaacgaatatcgtgttccaaaggatcgatacctaaaactttcaaactgtctaggtaatattgttgaatatccttaggagctggcttaataacaacttggaattggtggtgttggaataaccgattagggttttcaccataacgaccatctgcaggtcttctagaaggctctacataacaagctgcccatggttctggaccaactgcacgaagaaaagtgtaaggactcattgtacccgcacccttttcaacatcgtatgaaggcataatcatacaacctttggaggaccagaattgttccagcttaaagatcatattctgaatatttaatttcttatctgccatttcctttaatctcctcctgcgctaggccataaaaaaagcctatgcaaaattttgcatagggacgaaatattatcgcggttccaccctaattcaggaagtatccttcctgctcttaattgaacaatatgactagaggtgccttttcctagatgtcctcacaccgaccgacattcgctgaactagtacttttcttaaatcctcatcatcgtcaaatacgtttttattttaacacatgggtcatggtaaaaccagatttttactaactaaaaagttttaattcatctaaaaatttcttagtctttaaatttaggcctatcgtttcatggtaaatacgatcaatcgcttttctagtagccctcttcgtttcttcattaattttaatatcgcctaatcgctcaatcggtaataagccaattgttctaattacagcagtttcttttggctttaaatgcattcggctagtaactgtactaaaatgatcgctacaaataactccacccattttaatcgaataatcaaaaacgcctttttccttaccacaaataacacaatgctttagctgtggctcaacaccatatgctgctaatattttcatctgcacaatttgtgtaatcatttctgcatcaacgccactatctatttttttcaaagcaaataaagctaaatcataatatttaccaattggctgatattctacaaaggcgtgatcaattaaatcaaaaataaaagaaatataagcgttcttggttaaatcattatataagccatcaaactgccttgcccctttatatgtgcgtaaattacttaagcccttttcgctcgtataaattacgtaagtaccaatagaaaaatttaatgttgctgcacttaatcttgatttaggcctcagggctcctttaacaatcagagtcataatcccatcttgtttagtcataattttggctaataaatctgcttctttatatttctgccttttaaagataataccctgaacttcttttagttcacgtgccatatcatgactcctttagtatttaaaattcattttttatagatattctgatgaagatatcataatatcataaatagtctatagtacaaaaagactgctgtttcagcctccacatacgtggagaataccaagactttacccagaatcaacttcgaaactgggtttcagcctccacatacgtggagaatacagtaaacaaatcccaatataacaacaatcacaaaacaatagatcccaaaatttcatcactttgtcattactattgtatctatttttatcccattagttatccaacgaatagaattttcttgtctccctaaacatacaaaaaagacgtcatctttcgacaacgcttatacaacagtaattcaactaaagttcttttttgtcatagcctattcgctttaaaaagttagggtcagaacgccagttatgttggaccttaacccagagacgcaagttgaccttttcaccaagcaatctttcaatctcttgacgtgaattaatcccaatctgcttgagcatcttaccgcccttaccaataataatgcctttttgaccgtctttctcaacatagatagtcgcttcaatcaagagcttgccattttgatgagtattcatatgatcaactgcgacagcagtagcatgtggtacttcttgtgaagtcagtcgcagaatttgttcacgaattaactcggctaccacaaaatattcaggccgatctgtgatctgatcagcaccataatattgtgggcctactggcaaatattccttaatcgttttaagcagatcttcaatcccaattccttgagtagcagaaatcggtagtatttctttaaagccctcaagtttgtgatatgaatccataattggcaaaagcttattaggatgaatttcatcaactttattaattactaaaagaacaggaacttttacttcttttaacaagttggcaatgtattgatcgcccttacccatttcctcaggttcaaccatgaataaaactaaatcaacgtcattcaaactagatacactagccttatccatatagtcgtcaagttttgaatgaggcttaaaaatacctggcgtatctacaaaaacaacttgcatttcatctgaagtataaatacccgaaatgcgattacgagtcgtttgtggtttattagacgtaatggcaactttttgaccaactaaatagttcattaaagttgattttccaacattgggacgaccaactaaagcaacaaagccagacttaaactctttttcttccattatttacctctgccttcatctaattgatcaggatacaatggcaaaccataatcttctaacacttttccttgaataccaaacatttctttggcctcatccggcttaatgtggtcgtagccgtttaaatgtaaaaagccatggactattgtatatccaaattctcgatcaaaacctgtaccatactctttactgtgacgcttaatcacactaggacacataaatagatcaccgatatcctcttgaaagtctggatcatctgcaaatgctgcaagatcaattgaatcctcaccatcttcaattgcaaaggaaattacatcagtaggacggtctttgtcacgatactttaaattaatttcatgactacgatcttcgtcaacaaagttaatactcatctctaagttgttatctttgccaatttccttcttagctagcagcaaaagtttcataatccagtcttgccagttacgcttttcatcatctaaaaagccaacttcatcattataagtaatatcaattggatccatttttagtgtttaatgtcctctttttcataagcagtaataattttcgcaactacagggtgacgaacaacatcattagcagaaaagttgataaatttaatttggtcgatattcttcaagatatgtctagcatcaattaacccgctatgctgtcgaccaggtaaatcgacctgtgtcatatcaccgtttacgaccatcttagaattaaatccaagtctagttaaaaacatcttcatctgggcatctgtagtgttctgggcttcatcaagaattacaaaagcgtcatctaaagttcgtccacgcatataagcaagtggagcaacttcaattacgcctcgttccatcaaacggtcagtcgtattagtcccaagaatagcatacaaggagtcataaattggtctcaaatatggatcaactttttctttcaagtcaccaggtaaaaatccaagtgattcaccagcttcaacagctggcctagtcaaaatgattcgagaaacttctcccttcttaaaggcggcaattgcacaaactacggctaagaatgttttccccgttccagctggtcctattccaaagacaacatcagatttatcaatagcttcgacataacgcttttgtcccatattcttgactctgataggtctacctttagcatccctaatcaaaacctttttatataggtctgcaaagtactctgtggtacccttgtcagccatcttcatcgcacttactgtgtcgggcgcaccgatgttaacaccagtattcacaacactatcgagtgcctttagaacagcaactaccttcttgatcttctcttcatcgtctcctgcaatgacaatctcattaccgacatctgacacagaaagatcataaccttcagaaagaagctttaaatttccgtcattaactccaactagtttttgaatattttctggtctttgaggtgtaaaagttgtttgagccaaatagacccgctccttcttgttactactaatttagctgatcacgaactgattgcgaagcagccttgccatcggcacgtcccttaatctttggcattaaagctttcattaccttaccaaagtcggacttacctttagcaccaacttcatcaattgtttccttaacagctgctctaagttcatcctgattcatttgcttaggcatgtacttttctacaactgctaattcttttttggtttcttcagctaaatcatcacgattagccttaataaattcgtcaatcgattcttctctttgcttcttttcacgattaagaacagttaattcttcatctggagttaaatcgtgtcctgctttaattttttcattcattaaggccgatttgatcatccggacagtattaagagttgtcttgtcgtgattcttcatagctgatttcatatcagccatgatttgatctgacaaactcatttaatatccttctttctattaaaaacccaatagtattataacaaactatgttcttaactaaaataaaactaacaaatatttacttaacataatcaaaattatgcttcaagaagtcaaaaagaaaagctacccaaaaacaggtagctttctcagtagtttattaataatgtctacgcttacgtgcagcttcagacttcaactttctacgaacactaggtttttcgtagaattcgcgcttgcggtattcttgtaaggtaccacttcttgaaacggaacgcttgaaacgacgaagagcatcatcaatagactcgttttcgtgaacgattgtcttagccatgtgtgatccctccttccatttcttggcgttacgccatacatttacttaaattataccaaactaatctttagggtcaatacaattcaaaaactttttgataaatttttaagttaagtaaaccgactactttaccttaataaaagagctgagtttttattgttaatccgctttcattaatagtataattattttcagaaagatatttaataatacacgaggagcttaatatggtagaaacaaaagaccaaaatgaattaaacattattattatttctgatgcggctggtgacactgcttttagtaacgccacagctgcagctgcagaatttcctaactgcaatatcaactatcgtcgttacccctttatcactaaccaaaagaagttggacgaagttttaacagaaattgaaaaatatccaaacttggtaattatctacagtttggttaaagatgaaatgcaaatgccagttatcaaatttgcccgtgagcataatgttgaatgtgttgacatcttctcacctgtagttgaagcaattcaacaaactactcatatgacaccagatcaaaaaattggtgcacagcatagcttaaatcaaaagtactttgacagaatttccgcaatggaattcgctgtaatgtatgatgatggtaaagatccaaaaggtttcttggaagctgacgttgttttacttggggtatcaagaacttctaagactccactttctttgttcttagccaataagaacttaaaggtagctaatttaccacttgttcctgaaactcacattccaaaagaaatctacgaaattgatcctaagaagattattggcttgactaacgatccatctgtattgaacgaaatcagacgtcaaagaatgatcgcttatggtttgaatcctgatactacttattctaatatggattcaatcaacaaggagcttgaatcagcacaagcactttataagaaattaggttgctatgtaattaatgttgctcaccgctccattgaagaaactgccgcacttattttggagcacttgggtattgatgattacgctaagtaataatagatactaagatcaagtatgtccaaaaatcgttctagagtttctctagagcgatttttatttacagaaaaatatttgtaaatttatgcatattactgttctgactcccatgatctaacaatcatctaaaacagaaaacaggtattccaggcgcgatagtgggatctaaacctcattgatctaacaatcatctaaaactacctcacacctctattatttatttctttagatctaaacctcattgatctaaaaccgtacgttggtaccgccgcaaaagctaatagatccaaacctcattgatctaacaatcatctaaaacccgcgttaatgttgatttttctaaattcgagatctaaacctcattgatctaacaatcatctaaaacgttcctagcagggacaagattcaagtgcttgatctaaacctcattgatctaacaatcatctaaaacacgtaagcaccttttgaattggagactactgatctaaacctcattgatctaacaatcatctaaaaccgatatttcataatatctttttaatcaattgtctaataccaatcaacaagatctcgatcaatatatgcaacttgagcatccttgactgctaccccatatttcttatctgtgaattcaattaaaataattttcaatttaagttgtctaacaatcttactaagttcttttaactgtgtttcatcaaggtaatgagctacattacaaaacacgggaatactatcaagattatattcttgatgaatcttaagaactgtttcaattatagcatatggtgttaacatgaaactgtcaaatcttttgtgtaaatagatctttctcgtaaattgattttttaattatttatttaatcaaagtaggattctaaggtgtcctgaacctgaccaaagcatttatgaattcgattgaaataacggtcattgtagctcattgcctgaatgccaataaaagcatcaagcgactgttcagttggaaactctgccttaggcttagctttgcgcttgatcacattgttaaatgattcaatcatgttagtcgaataaattgaagctctgatctgcttgggatagttataaaagaccagcagatctggttctatgtctttcaagcttctgataacatggctgtaaaccttgccccatttggtatagaagtcatgcaggacagctgtggcttcttctttgtttgtctgttgatgcacctgtttgaattcgttcatgatcttttcgcggtcatccacccggactttagcacagatattgcgcatgacatgaaccaagcagcgttgaaaatgagctttaggataagtcctggtcaaggccgctttcatgccaacaacaccatcagaaagaaagagctcaacttgcttcaagcctctggacttcatgttttgaagcatctctgtccagacttcaatgttctcactaggcgcaatgcagtagtcaatgacttctttatgtccattaggtttaatgccaatggcaatatagactgcttcacgctcaaacgtttctcggcgcaaaggaaggtatgtcgcatccaaatagacacagaaaaacttgtcgcttagcttgcgcttgtgataagcctcaaccttggggagcatctgcttggaaatatttgatacttgggctggactataatgactgccatacattttctcaatcaagtcagcgatttctctggtagttacgcctttggagtagagcttgataatcgtgctttccaaaacatcagagtgctgcttgtagtcaggcagcgtgtgctgatgaaactggccgttgcgatctcgaggcacttgcacttcaattggtccaaactgggtatcaaccttgcggaaataagcaccatttctagaattgccagtattccagccatttctggcatagggatcatagcccagaaaggcagtcaattcagcttctagcaagttattaacagcctgttgtagctctttgcgcaataaatcgtttattttgtctggattgaatagagcttgtgctatatttttggtaaaatcattcatgaaggagttcttctttctgtatgtgtttttttgttcaaaccaatcatacgagaaaggaactcctttttctaatgtttaaagaaataaatttaaggaattattcatccttacacaaactattttacagtctcgttaacattaattgagcatctaaatgaatgttaaccattttcaacagctttttaatatcttcgctaaaatcaatttctaaaggtaaatcttccaaaagcaaagaatcattcaatactgtttctaatgaataaaaagattttaaaattctatttctgtttacctcatccaagttagaaataaagttcttaataatgacattcatatactttgccataatattgtcatttaacaacggggctcctacaaaatcaaaactcttactaatagacttattgttgtattcgtcatcagaacatactattagatcatttaaggcttgaaaacctaaaaccagatctttataggcaatgggactttgagtgcaaataacattaattccatcttttaaacagattttcttatgtgacaaataggaaacaatcatagtatcactgtcctgtctgaagtattgcgaatatcttttactgcatccccaaccaagaaatgcatatcactgtactgtttttccgtaaccattagactttgcacaacacctttgctaggcataaattttcttattctcttttctaaaaaattagctgtttgtctagtgacacatactctttcatacaccgaaaactgaatcattaaaaatccttcatttattagagcttttctaaattgtcgatattcttttctttcagcggcagtgtccgtaggcaaatcaaacattatcattaatcgcatcattcggtacctcattacacaaactcatctctattctaatatcatctgtttctccacttaaatatctaaggcagcttcttacatatacagaaattgcattcgttaaaattgtattcctaccattgaattttatttgtaagctaagcaactcaactaatccatacttaatatctggtgtaaaactggtaatattttcgtgtgccttaacccaataatcaactatggatctaaatggttccattaaatcacaagctaaattaaattgattttccactgaatgatgatgtattcccagataagtcaaatatccattcattgcaatttctctatcgaaggatgaaagcaatattgagtatccataatctagtgctgcattaatcactccggaatttcttctaataaagtccttaccaaataacttcatgaaatattttctagcagccgctgcttctctattggataaatcgttcacctctaacttgtacagctcttgctcaacttcagtttcatcaattcgataattttttaacaccgatatttgattttttagcttagcagctacaattttggtccataaattttcttttcttctttcattccattcaaattgcattttcaacttctttatgtccctagccccaggataataattcactgtctctgtaacaggttgatatttatcatcaacaaagattaccttgcattgatttttggctaacttacttatcaaagcactagtaatcacagcctgtgatgttgaaattaaaaccaaattgatatcttcaataggtatttgattaataccatcttttgtttggactataagcatattcatagagtatgttagctttgcatgctgagttattattacgttacgccatcccattttttctccttgtacatctatatctataatgatattatttatttgttgggtagctcccaactcttaaccttattgatctaacaatcataatttaaaatcaagcaatgcgttttagtacgcagagtttcaacacttgtcccgagctatcgagggactttttttatgtaaaaatgaggaaccacatgtcggttcctcatttatttttataaactagaaatcttaacgcgtttttcaaacaaaccagtaggtgattgataaactaaaatagtgtccgaagataatgtaattccagaattattttgaagttgaccaaatggtacagttataccaatatctttaagttcacctgtatcagaattatcatgcaaacccttcaaaatttgaataatagctttaaacttatcctcagcgtttaatttcaagaatttttctctacccttatgtaatttatttctaaaatctctaatgtcaaacaaaggtaaatatctatcaatcttttctaaaatttcatcgtaaacatccaaaagttcttgatcttgcttatcagaatctagccaatgaccagtaattactctcattgcctcttctgataaaaccaactgttttgcattacataaataaatagcactctttaacaaaaattttttattgccatcttgcacaacctggttatatggaactttacctttaataatatcaaatgatattactcctgcttttcgttttcccttatcgttgtataaaatacttggtgataaaatttgctttagaatcttttcatagttaccttctttttcagctttatttaaaatagcacgcttcgtcataggtacagcaattactttgtactgtgaagatttagtcttattaattcttacaattgccatataggctgctgcagtaccagtatagccaccataaatatctgttgaaaatcctttacgtttttcaattaatttacgactcttcgctatatcccgttcagcccgaggatatatagtcattccaaacatctcttgattctttgttgtcgtatctctagatacaagcatatatttgtaattatatgccttattaagttgcaatcgaattttattcttttcaaataaaactttcccctgttgagatctgatctcatttggtgctttactacccaaaagtttggcaacaaagtcaaaatttttggtcttttttaaaatttcattttctttttttaggatcagaactaaactttttaaattgaccataaacaaagaatggccgtaatttaggatacgcttgatacagtagattcccacaaatagtagttaaatatgcatcaattgcatggtgataatcattaacctctcgacttttatacaaatcaaactcattacgtaaatagtgattagaactagccttgacaactattattttagtctttggatactcagcttgaagaattgtagttgctaattttatgatttgacttgtctcaactaattgtttacgaataaaacctgaagcttgatgtttattaatattctctggatctaggaataaattattttgttttgctttattaatcagtcctttatcagcccagttattccacatctgcttaaccgttatccctaaaccagtagctagattatcaccaaagagttttaaaggaactccatctgacttaccattgtttattggtttagcaaccaacacacgattattcagggaatcatctttaataaaactttgaggcaagatatggtctatgtcataatactgagatacttcatcaatattaattggcttaccagtataagcatctcttccaagttgcatgaagtgtctgggaaaaaactaagtctcagatcatgaaaaaagaacgttgaatttttgtttcaacgctctttttgtatacttttagctccagccttgatattattaaatcatcacaaaataaaaacaaaaaggtggaaactaacatgtacaaaaattatatcacaggtcaaactgctttaacacttaatctagattttgccattccggccaatcatttggctaatgtcatcagctggtttgtagattcaattccagaagatgttttagtaggcaagactgctaaaacgggccgcccagcctatcatccagccatgatgctcaaaatactgctttttgcttactccagaagagttttttctggcagaaagattgagttgatgctggaagaaaatctgccaatgatgatcttggctgaccagcaaaagatttcatatcatactatcaataattttagatcaagcagccatgccaatgaactgattaaaaagagctttatctacttcactaacctgttagaagatgaaggcttaatcaatgaaggtgctgcttttatcgatggtactaagattgaagctgatgctaaccgctatacatttgtctggcgcaaagcggttgaaaagtatcatgaaaagctgaaaggccaggcagttgaactttatgatgaattgattactaaagaagtagtcaaagaaatggaaaaagaaaaagttcaaactagtcaggggctaaaggaattagctcaagaaactgaagcagaaattaacaagctgactaaagagattgagcaggaaaacaaagccattcctggcggttcacctcgaaaagccaagcgacgtggactaaaaaagattctgcaccggctaagaaaagattatgtgccaagaatgcaaaaatatgaagaagccgaagagatctttgccggacgcaacagttattccaaaacagatcatgacgccacctttatgcatatgaaggaagaccacatgaaaaatggtcaattaaagcctggctacaatattcaagcagtcacgaccgatcaatatgtagttgattatgccatctttcctaatccgacagatttcaaaactttggagccggttttggatcaaatgaccgtgttggacaagtttgacaaaatcgtcgccgatgctggctatggcagtgaatacaattattcgatgctggaggaaaaatatccagacaagaagtactttattccctacactatgtatgaaaaagaacagaccaaaaagtataagaatgatccaactaagctaatcaactggtactacaatgaaaaagatgattattacattgatcatcatggcgtcagattcaatttcaaatattacagccagcgcaaggatcgttctactggtcaggtccgtgattttaaggtttatgaggcagacgagttccagctaacgccagaattggaacaattggctaaaacagctagcggccgccagcgccaagttcgctataatcctaactggcaatatttaaaagaaaaagcaaaagaagttctccaaagcgaagaaggcagacacatctatggcatgagaaaatatgatgtagagccagttttcggacatttgaagaacgtatttggcatgcgcagaacgcacctgcgaggtaaagagaaggtcgaaaccgatatcggaattgcctttatgatgatgaatttgaacaaatattgtcaaagaaggtggctgaagggccgatttttattgttaaaaattttaaagagaacaaaaaaacgatcaagattcttaaaaaaggaaatcttgatcgtttttattcatctggaagctatttttttcccagacacttaattgattattcttgatatattcagccagcttatccttcaaatttttatttactatatctcctgatattttttggtaaatatcctgtagcttatgccctcgtgtttgtgataacttagaatttcttctactttcacgtgcaaattcaatagctatttgtttaggtgcttgaccagaagcagctttttgaatgtcatgaacaacttttacaacctgcctaatcattttcttatttgcaggagaagtatacgcttctgataaaatatcttccatactatttgaatgcatgagatcttgatttgcatctgtaattgtgccttttatatctgctttatttactatactcatgaaaatttgttggctattccacaactgctcaataatattttgaccatttgaatctacaatagcagttaacaattttttagataatctgccccaaccctgaagtctaatattttgtaggaattgaatttgttttgctgtaagccaatcaattgtttgaagcttttgtatataaatctgcttatcttcaaaaatagttgaccattcaataattttttcaaaatcatcacgaaattcatttgagtcaagtttatcaacaaataaacctgacttttttaatttaatgtatgtagataaactagaattaaatttagtttgatcagctaaccccttaattttgatataaggcaatttctgattttctattaaccaatttttaagctgcttagctgagacagtattattctttttgaataagtcctcataaagttcttgctttacgctaacagataatttcttcccattcacactaattttatttaattcatccaaaacagtatatttttgatataaaagactatttgctggaagaacatcttcaccaaacaaataagtatcttttgttgtaagtcgtttaataaagttatttgcagacttttgtctatcaactttttcatcaaaattccaaggcgtaattcgacctttagcttttctaaccatccaagcaaaagattgattttgtcgagtttgaggataagatgaatttgttggttcaatcattggaccaacatagtatggcaccctaaaacgaatcagttcatcaagcttataaggtgcctgcatacgatgagctttaattggattaatctcttttaaaaatggataatattttccctgattttcaattatcttatctagctcgatttgattaagctggaagggaattacgccgttttcatcgcttcgttgcttaggcataaacttatctaacgctatttcttttctaatttgaactgcctcttttgatgcatccaaattctttttaactatttcataaaaatcgctttttcgataaaggtgcttgttgggaaaggcttttttagtttcaacatcaacaaaatgacggttattgacatatttgtcgtaagccaactgtaaattgtgagcttttttcctgtctgaatggttcttgattactgtttttagcaatttcaaatcttgggcatgatcgttatattttcttatcatagattccgataaagttgaaccttcatcgacaatattcagtagagaaattgcactaaataagtttctaactaaatccaatatctgtaactgagtatcagttaaatcagaagtaatttcactcaaatttacatccgcattttcatcatttaatttaaaattccaaattgagctgtcagtcttgtctacatttacttgtaaaataatttcaaattttgctttgtatcctaaaattgctttgctaatttcttttgaaatttttttacttagttttagaccagacttattttcagtgtcgggtaacacatcagcaatttcttttatcttatccagtttaaacatttgttcatttcgaataatgtcttcaacttttgaagcatttcctgcatcaaaaatcactccactttctggcagaaatatggaataaagatcgtttagttcatttacaaacctatcgatttcaatctttgacgcactaaaattacttatggatgaattagacaaaaaatttcctcgatatttcacgatatgatgaatggcaatataaatagcccgaagatcaaacttcttatcctgtttcattaaagcgtttcttaaatgataaatagttggaaattttttataaaattgtttatccatttttttagttggaaagacaattgaagacacatttttccttgtgtccaatggagaaagtcctgactcttttaaacgagcaaagaaatttggatctacctttgccatttcttcatcaaaaatttcttccaacaatttaagacgccattttcttcgctttatacgcctcctagtagttctaaaagctcgtctatcagcagctgatacgccttcatcaaacaagtgcgagccaagtgctctttttccatgcatttttaatatattattatcaaaatcagtagcaacccacccacatgaattagtaccaatatctagaccaaccatatattcattatttaacttcgtcattattattctctactttcattgtccaaatgagactgtaaaatagtttgtgtaaggatgaatgattccttaaatttatttctttaaacattagaaaaaggagttcctttctcgtatgattggtttgaacaaaaaacacatacagaaagaagaactccttcatgaatgattttaccaaagattttgctcaagctctattcaatccagacaaaataaatgatttattgcgcaaagagctacaacaggctgttaataacttgttagaagctgaattgactgcctttctgggctatgatccctatgccagaaatggctggaatactggcaactctagaaatggtgcttatttccgcaaagttgatacgcaatttggcccaattgaagtgcaagtgcctcgggatcgcaacggtcaatttcatcagcacacgctgcctgactacaagcagcactctgatgttttggaaagcacgattatcaagctatactccaaaggcgtaactaccagagaaatcgctgacttgattgagaaaatgtatggcagtcattatagtccagctcaagtatcaaatatttccaagcagatgctccccaagattgaggcttatcacaagcgcaagctaagcgacaagtttttctgcgtctatttggatgcgacataccttcctttgcgccgagaaacatttgagcgtgaagcagtctatattgccattggcatcaagcctaatgggcacaaggaggtcattgactactgcattgcacctagcgagaacattgaagtctggacagatatgcttcaaaacatgaaatcccgaggcttaaagcaagttgagctttttctttctgatggtgttgttggcatgaaaacagccttggccaggacttatcctaaagctcattttcaacgctgtttggttcatgtcatgcgcaatatctgcgctaaagtacgcgtcgacgatcgtgaaaagatcatgaacgaattcaaacaggtgcatcaacagacaaacaaagaagaagccacagctgtcctgcatgacttctataccaaatggggcaaggtttacagccatgttatcagaagcttgaaagacatagaaccagatctgctggtcttttataactatcccaagcagatcagagcttcaatttattcgactaacatgattgaatcatttaacaatgtgatcaagcgcaaagctaagcctaaggcagagtttccaactgaacagtcgcttgatgcttttattggcattcaggcaatgagctacaatgaccgttatttcaatcgaattcataaaggctttggtcaggttcaggacaccttagaatcctactttgattaaataaataattaaaaaatcaatttacgagaaagatctatttacacaaaagatttgacagtttcgtccaaattattatttttgagcccaattaatgtctactatcatttactaaattcaatgtaaacgttattaatttaattctatgtaaatcccaaaataaagtaaagaaatttcaaaaatacctagactcgtaattaaaaacatattcacatatactcatactaactttttgttattaatcgaaatttaattgtaactttctcgtaaaactgctgagctacaatagtttaggtgaattaagagaggagataaaaatcagaacttatctggtttctttttataatgaaatttcgtaaattaataatttctttgttaggtactgcattattaacttcaagcgttggtttatcaaccaccactgcttctgctgatacgcttgatgactcacaaaatacaactgaagttcaacccaagaacctcaagtgggcttatccgtttaaagccaacaagaaaaatggtgttcgtccaatgtataatgcacaaacttttggcataactaactatatgcgttctactacaccaccttcctactttcatgatggttgggattttggtttttcagaagttgggcattctaacgtatatgcaattcatcaaggtactgttaaaaaggttgcttatggcaacggccttggctggttcatctgggttattagtcctgataattacgttgaagtttaccaagaagggtttaataagaaaaaagacatttatgttaagactggtcaaaagattaaattagatcaaaagatcggtaagctaactggctcacacttacaccttggcgttactcaaacaaataaagattacataaacaaatatggttttccatgtaagaattggaacgttaacaacggaacttggctcaatccaatcgaggttatcaaaagcaacttaaagaaatagttaacataatctaaaatattgaaagtaaaaaagcaggtcacagcttataacagttatgatctgctttttattaatcccaatgttccttgataaacttagctcttccaccagcttcttccattgcatatctaagtggatcttttttataaaaatcttggtgatattcctcagctggataaaatggcttagctggttcaattttagttacgattggtttatcaaatttaccactagcttgtaatctttgcttagatttttcagctgcttctttttgagcaggtgaattataaaaaattacaggtcgataattatcaccacgatcttggaattgccccattgcatctgtgggatcagtcacttgccaataatagtttagcaattgatcatacgatatttttgctggatcaaaggtaatctcaacagcttcagtatggccagtcgtacctgaacagacttgctcatatgttggattagcaacatgaccaccagtataaccagaaactactttttctactccgtcaactgtatcgaaaggttcgaccatgcaccaaaaacaaccgccagcgaagattgctgtgtcgttgttgggttttgccttggtatcagtggttttggcttgtttattattctctgtcattctttgaaatacctccattttatttgaattttattgcttttttaagttaactagtattatatacaaataaaaatgagatgcactttttattacctgatgtatcccattttatttctttacaaattattgcgtctttcttcaatatccttttcaatctgttctaaatcatcttcgatagcaagatttaaaataaagtttttcgtcgttgacctcttattaatgtaaagcttacgggcctcatttttatcattccactttttatttacttctgtatatttagccattaaaaatcactttccataatgctatagcaatcacaatcaaaacaccagttaacaaagctcttttaggatagaactttaatgaccatttagtatttttgccagtatgagttaattttataggctttcggcatatttgtcacctcttagctccgattctcttagcctcctttcactatatacaacacacgcttttacgtgtaacgcgaatgatatttagaaaaatatgccaaaaagggcatcaatctggccgtctaaagccaaatgatgctttaattgttttttcaccaaaatcaatagcctaacttaatgacactgtttttacataaacttattaaatttataattcttcatattttttgctctttaattaatttgttatcaaaattgaatacaacgattagtagctaagtccttcttacgattaccagattaccaattcatctcgattctattttagatttcttagcatcttttcactatataagtgaacgcaatctccgtgcaccatcaacaatatttttaaataatatacaaaaacagtcactctatagaacatatttttcagagcagctatttagcctccacatgtgtggagaatacttaagcctcatcttttggctgatgtaacgacttggatcacctccacatgtgtggagaatactaaacggctgtggcgttgacacagctcaaagtaggatcacctccacacacgtggagaatacgctaactggataccagtcatcaccgttaacagtaggatcacctccacatgtgtggagaatactctgccttgtctcccgtgcccttcaagatgataggatcacctccacactcgtggagaatacactaaatgatccacgatatatcaacatccctcaatcgaaataatatcatttttaatcacttttaacaaagaccaataataaagccataattacaaaaagccactccaaataaaaaagaagcatttctgcttctttttgaatagttttgctcccaaagtgcccctaggattcaaatttcatttataaatccttatatatcaaggtttaagggctatccattaaacgatttcttgctccttgaagcgaccatatactttttcaacttcactaacactcatgaaagcatacggatctgctccttgcacgatttggcgaatatcatacatatcatatcgatcaataatggtaatcaaaactgtcttttcaatatgactgtatgcaccttcagcatcatgcaaaatggtaattcctctatgcatccggttttgaataccatcgataatatgctgtgggtgctgagtaacaatcattacttgcatcttctggtgttgggtataaaccgcatcaattactcgcccattaataaaaatagtcaaggcggaataaagagcacgtggccaaccaaacatgtatcccgcagcagcgataataatcaaattaataaaaatattaaattttccgtaactaatgcccgttttttgcctaattacaataccaataatgtcgagtccaccagttgaaataccgttctttaatgccatcccagttccaataccgttgatcgaagcaccaaaaatcgcacaaaccagtgggtccaggtgcatctgccaaggttgaatagcgtgcatcatgatagaacctagaacaacagcaacgatggtgaagaaagtaaatttatgtcctatcttgaaccaagccaatataaataaaggaaagttcaaaagaaagtacatcattgatgttgataatgtaaacggtagatatctttcacttacagtattaattaattgcgcaaaacccgtgattcctgacgagtacatatgccccggcgtccaaaaaaagttcaaggcaactgcaaccgcaattgaataaaagaaggcagctgacaattttgaaagaaaattgtagcgtcggttgaacttatcaagttgatccatagtttgtcaaatcctttgagcaaatactaatagtaaacacattaattttaacaaaagttttgctgctgaccaatctaaatagacatttttatcacttttgttaatcggagcaaaaaatgatactattcagttaatattaattagtctatccaaatagaaaggtgtctttcatgagttcttactatgaattaatgtggcgtgacgatgaactaacttcttataccactgacaagctgaattttatctacaacgcaatcgatcatcccttgtctgtccgctatagacagttatatcctaatcgattagactggcaaaaagccgtaaacagacacaatgcagctattcaaaaagtcaaagaccttcttattgaaagaaaagatagtcataatatacgtgaagcttggtttaaactggatcccaatgcacgaactaaagcaaacaatggttttactgttgaacaactagctaataagttcccttacatggcaaaacaacttggtgcctttatggaaattgaaaacatcgaaatcaaatactttgatggagaatttaagcctagatatgacttagatgatttttctgatattttttctgccaattatcccactagtggctttaaacaaagtggcattactcaagaagctttactgaagctctaccctaacatcagtgctaaaaatttagaccaaattttaaaaatggccgactgtgaattagagcaagaaaatggcactgaagttattccttattggtatgctgtcaatgctaaaagaatgctaatcgatggtgatagttttgctgcaacctttgacgactaaaaaactgaccgcttggtcagtctttttattggataatttgaacaccgtgttcatcaggatgtaagattaatgtctcatcttttaaatcatgtttacgtaagcccgacaaaaatccagctacatgtttatcttcaatccacgtcataatcgttgaacctgcgccgctcaaataagttgccaaggcatgttttgaatgagctacctcccgcacttttacaagttctggcactagtttttctcggtaaacttcatggaatacatcttgttccattaattctcctgctttagggtagtcttgagcaaacaaactagcaattaaagtattagcaactgctgagccatgcgtagctacgccaaaagctaattctttaggcaaaactgctctagctgtcttagtttccaaattataatcgggtacataagccaccaacgcatatggaggaagtggtgcttcaactgcatcaaaatgatggttaacttcagcaccaacaaccaagccgcccaaaatagtcggtgcaatattatcaggatgtccctcgattttagctcctaattgaaccttttcttcatctgatagtcccagcttaccaatttgattagccaattcaattccggctgcgatagcacttgaactgctacctaaaccatgagccaatgggatattgcttttaacgcgtaaatgaagcggtggtaaccctggataaactgttagtgcagtcttaacaattaaatttttttcatcatgtggaattcctttcatcacatgatccacctgaaagcgatcggctaagcttaaaacttctacttccaaataaagtgaaacagccatgccaagtgaatcaaagccaggacccaagtttgccgttgaagctggtgctttaataatcattttttcccttcctttactgcaaaatcttatagctagcttttaaatattgatcttgaatcgctaaatcttgtagctgctgtcgactaatattttcggttacaactacaattcttgattgtacttgtttaatctcacgaaccggaatttccaaatcagagagtaatttactcaaatcaaacaaggtctcttctgcttcgaaagataaataataggaatacttcacatcctccgaacttgttaattgcataacatgggagaaattactaaatggctgaccggtggtctttttcactacgttttttatttcagtaatcacatcactcatgactgaattagccgttgcagagctacccgcacctgggcctgtgaatactgctgttcctaggctttggctcttaatttgtaaagcatttagttcatttttaatatgcgccataatcgcattttctggcaacaaacatggagcaacttctacaaataatttaccattaatatttttggcaatcccaatcagcttaatgacatagcctaacttctgagcctgtttaatgtcaaaatcctttagattattaatcccttgaatagtaaaatcatcaatactaatcttagtaccaaaagcaaacttgcttaaaattacaatcttgtatgctgcatccttacctgtaacatcgttagtgggatcagcctccgcaaagcccagctcttgagcatttttcagcgcttcctcgtagcttagtcccttttcccccatttgtgacaaaatataattcgtcgtaccattaataattccttgaatttcggaaataatgtcactggaataagaggtagccaaggtccgcaaaatagggatcccacctgcaacgctagcatcatacattaaatcacactttttacttgcagctaaattaatcaattctgaaccaaaagttgccattaagtctttattggccgtaactacattttttccagcattgattgctgcagtaatatattccttagcaggatgaagcccacctattaattcaactataattttaatttcgggatcttgcaaaatcgaatcgaaatctgtagttagcatcacttcgttagctaaattacgatgtttttctggattacgtactagagctttttcaatgatgatttcttcaccacttgtttgtctaatcttctttttattatttttaattatttttaaaacacctgaaccaactgttcctaatccaagcaatgcaattttgatggccatttgatcttatcctctttttaatgattttcttatttttacgattgtatcataggtgctaatcaaggtacaatagttataatattaatatttcataagataggaagattgtttatgcaatatcgtagtactagaggttcaaaagaaaacactttaactgcacctcaagcaattattcaaggcttggctcaagacggtgggctttacgtgcctgttgcctttcctcaagctaattttaagttagaagatttatccaaactttcctacaagcaaatcgctgccatggttattagcttattctttgatgactttactaaggagcaaatcaccactgcagttcaaagcgcttatagtgaacaatgggatgatcgcagcattgttccaatcgaaaagcacgataaccatttttacatggagctttttcacggtcctacccttgccttcaaagatatagctttgcaaatgttgccacaattaatgaccagagctgttcaaattgaaaagattgataaagatattattattttaaccgctacttctggcgatactggtacggcatcaatgcgtggctttgctaatcaaaagggtaccgatgtcatagtcttttatcctgaaggtggcgttagtcctgttcaacttaagcaaatgctcagccaacgcggcaacaatttgcgtgcaattgcaatcaaaggtaactttgacgatgctcaaactgaagttaaaaaaatcttcaacaatgattctttcaaaaaccgacttaatgctaatggctatcaattttcttcagctaattcgatgaatattggtcgtctggttccgcaaatttcttactacctctacacctatggacaattagtacgcagacaagaaattaaactaggagacgaagttaactttgctgtgccaacaggtaactttggtgacatcctagctggatattatgctaagaaattaggtttgcctattaaaaagttgatttgtgcatctaatgaaaacaatgtattgactgatttctttaataatggtgtctacgataagcgacgtaagttccatttaaccaatgcaccagcaatggatatcctagtttccagcaatttggaacgacttttatttgacctttatggcgaaaataactatgaagtcgctagtttaatgaatcaattgactcaacgcggtcattatcaagttagcggtgaagttttcactaaattacaaaaaaattttgcagctggttttgcaacagaagaagaggttaaatcagaaatcaaacgggtctacaattatgaccgctatgtaattgatccacatactgctgttggctcttttgtagcaaatcaatatcaaaagaagaccggcgatcaaaccccaatggtcattgtttcaacagccagtccatataagttcccagaaacggtgtatgaagccatcactggtggtcctagtatgcaaactggcgtcggtgcaattaaagaattgcatgatgaattaggcggtcaattatcaatcggtgtgcgtgccctttttgatcgtgaacccaagaccgaaaaaattattgaaccaaatgatatggaaaaagaaatcagttcaattttagatttgaaataataattaaggaaaaatagatatgaaagttgttaaatttggaggttcttccctagcctcaggtaatagcggagataaggccctaagtattattaatgccgatcccgaaagacaagtcgttgtagtctcagcaccgggcaaaagaactgaggatgatattaaagtaaccgatctaatgatcacttacgcatatatgagcttgaggagtaataattatcaagacatcgctacccgtatttttaagcgttatgaattaattgcccaatattttgagctgcctgaagcagaattagaggatattaaccagcttctacttacattgccgaagctaagttaccctaataatgactaccgcatggcaacctttaaagcacacggagaacgtcttaatgcaattttgattgctaaaattttaaatcatcaaggaattaaagcacgatttttagagccaaaagatgtaggtttaattgtcactggcacttctaataatgctgaagtcaatcctgaaacttatgtgaacttaaaaagaattaaggctgcaaaagatgaaaagatcatttttcctggcttctatggcattacaccatcaggacatattgctactttctctcgcggtggttctgacattaccggtgctattctagctagggggttaaacgctgatctttatgaaaacttcaccgatgtcgatgctattttttcagccaatccccatatcgttgatcagcccaagccaattaaaagaatgacttatcaagaaatgcgggaactatcttatgcgggattttccgtctttcacgatgaagccttaattcctgctattcaaggcgaaattcctgtcaatgttaaaaatactaatgctccagaaaaacctgggacaatgatcgtaccagaggacggctttatacctaaacacacaatcacaggtattgccggaggcaaaaacttcgcggccctttatttaagaaaatatatgttaaataaaggtgctggtttcaccttgaagttaatggaaattttgcaaaaacatcatgtttcatatgaacatatgccatctggaattgatgatattaccattattttcaaaaaagatgtcttaactgatcaattaattgatgttatctgtaatgaaattcaaactagtctaaatcctgatcaaatgcagtggattgatgattatgcaatcacaatggtggtaggtgaagggatgaaggacaagctgactttatgtgctagcttgctttaccctcttggtaaaaagaacatctccattcaaatgattaaccagggtgcatcccaaatctcaattatgattggtaccagacggcaagatgaagaagtagttatcaaaaccatttatgataatttcattgctcaggataaaatttaacataagctataatataacaaataaaaaaatggtaaatctggttattagtaccttgatttaccatttttactttatgagattatctttttactaaaaagtaactactttatactccaaatatttttctccatcaaagttcattttcacaataaatggattctttggctggatcatagcaaaggcttcatatttaaagcttggatcatagtaattaattactgatccaattgctgtaccatgtccaccaataatcatagtttgatcttgatatttggacaaaactagcttcaaagcagcaacatttctcttctgcgtctcttttaaagactcgccatttcttagcttataatcaaaatcttcccactgtctttcacaatattcatgaaaattagaaatccactcatcaccaatttttctttctctaaagtcagaaatagatgataatgttagtttcttctcgtctataactggttgaattgtatcaattgcacgcttgaatggactagaaaaagcttggtcgatgtgtttatctctaaagtaatcagttactttttttctatcttgcaaccccttttctgtcaaaggacgtgttaaatcatcatgaactgataaatcaggttgagcatgtcttacaaaatatactgttgtcataattttctccaaagcgataacagagactgtaaaatagtttgtgtaaggatgaatgattccttaaatttatttctttaaacattagaaaaaggagttcctttctcgtatgattggtttgaacaaaaaaacacatacagaaagaagaactccttcatgaatgattttaccaaagattttgctcaagctctattcaatccagacaaaataaatgatttattgcgcaaagagctacaacaggctgttaataacttgttagaagctgaattgactgcctttctgggctatgatccctatgccagaaatggctggaatactggcaactctagaaatggtgcttatttccgcaaagttgatacgcaatttggcccaattgaagtgcaagtgcctcgggatcgcaacggtcaatttcatcagcacacgctgcctgactacaagcagcactctgatgttttggaaagcacgattatcaagctctactccaagggcgtgaccaccagggaaatagccgatctaattgaaaagatgtatggcagccattacagtccagctcaggtatcaaatatttccaagcagatgattccaaaggttgaggcttaccacaaacgcaagctaagcgacaagtttttctgcgtctatttggatgcgacataccttcctttgcgccgagaaacatttgagcgtgaagcagtctatattgccattggcatcaagcctaatgggcacaaggaggtcattgactactgcattgcacctagcgagaacattgaagtctggacagatatgcttcaaaacatgaaatcccgaggcttgaagcaagttgaactctttctttctgatggtgttgttggcatgaaaacagccttggccaggacttatcctaaagctcattttcaacgctgcttggttcatgtcatgcgcaatatctgtgctaaagtccgggtggatgaccgcgaaaagatcatgaacgaattcaagcagatacatcaacagacaagcaaaaaagaagctgcagctgtcttgcacaaattctatgccagatggaataaagcttatagcaatgtcatcaaaggtttgaaggaaattgagcccgatctgctggtcttctacaattatcccaaacaaatcagagcttcaatttattcaaccaatatgattgaatcctttaacaacgtcatcaagcgtaaagctaagcctaaggcagaatttccaactgaacagtcgcttgatgcatttattggcatccaggcaatgagctacaatgaccgctatttcaaccgaattcataaaggctttggtcaggttcaggataccttagaatcttattttgaataaataattaaaaaatcaatttgcgagaaagaactatttacacaaaagatttgacagtttccgataacatattattatacgcgtggtgctagttaaatcgttctagacaataagccaaattataagctaaaattgcaatttccaaccggctttgaaagcctatcagactacgtgctcgattgttctcggcattgtaataggtcagaagcgaaaagtcgctttcaattgttctgcgaatagccatcaattgatgatcattgtgctttttagctcctgtcatatttttacgatatggtgtccaaagttcataacccatttgttttagctgttgatgcagttctttgcctaaatagccttcgtcgccaagaagatagtaattagatggatgggcattttccagcagttcaactgtctccttggcatcatgaactgatgcttttgttacgacataatcaagaatggaaccgtcatcgctaacaatggcatgaactttgaaaccatagaagtaaattttcttggtggccttataaccaatgttggcataaccgcgaaaaattttagcacgatagttgcgaattggttggcaaacaggtaccggaaagctgtcaatgatcaagaaatgtccattcaggtcaacctttttattcatttcttgccgtatctgataaatcaattgcaatagctgacgtgaacgccgattaaaacgtgagtgtgataaacaattgaaacattcacagaatcttctttgtgattcaattcctgtcttagcttgccagataagtaaagccaaaatcagactgtccgtagttttaatttgatcaatatttcgccgatgagtaaactcagccggtgcatacaaacgataccagtgccgacaaattatcactaaatctttaaaactaacttgtaaatggtggctaaaacgcttaagcttaaggcagttcaatcagatcagactcttttctttttgatactacaacttgagtctagtccgattggacttttttattaactaaaacgatttaactagcaccacgcgtattattatatttttacttccgttatttgaatcagattttacttaatctaattcataaattcaataataaattaacttttccttgctctaatccaatttttcacgatacactaaaagcaaatgtttgtatactcacgaaaggattttatatgggattagaaatactaaatcatactgatcaaaaactaatttccaatgccgatttttggcaattagttgattttcaaagagagtcaaataaattctctgagtttaaaggcgtttcctttgtttctaatattaaatttattgagcaaaatcttataccacgttttgaccagatcacactaattcttggactaaccgataatggatcaaattcaattggcaaaagaattgaccaaattttaaataaacgtcgtgatttgattgaatatagctacgaacaccaagatagtcccttcactaaacgtattttagatggtagtttacagctttttttcaccaaacagaatttgattcacactaagctttatttaatggaaaatcaaagcaagtactctgccttttcaggttcaatgaatcttaccgatacggctgttaataaaaatatggaacaattagtttgggattacggcaatacttctgatccattattcaattgctatcaacaaatgtttcaagataaccttaatcaggctacaacttatattaatgctaaaaaactatctggttatttagaagacaaaaataaagacgatcttcgcattcatgtaatgcaagattcttctcttgaaatcaaaaacagtcctaattcaactggtaaagacataattattctcccagctgaagagataaaaaagtatcgcgaccactacagcaaagatgatgaattaaagaaattatctgaaaatgaaaaactcgttgcttctcaaacagttactttatttggtgaaggtggcaataaaagacgtaagctagatacaatcgggcaagatttatatagcttgactcagcacattattcgtcaagacaaaaaggcaaaagcagatacatcacaaattgaaaaagaagaagatctcttccctgttcctgttcagttttacaataatggtcaattattccaagcctctaaaattggtgataacatcccttctgaagttattacttctgatttaactgaagggcaattaaaaaatgcgcttcaacttttctgtgatatcactcatgaatataatacttacaaagaagttggtgaaggctggcaagcttgtgactttatgctgtttctatatgaatcaccatggctttggaaaatccgcaatttatatgaattatctggaagcaatgtatctagagaagacgtgcctattgctacagcactaatcggacaaggtcgaactggtaagtccaccctagggaaaagactagccgctaaattaattggtgctcataatttcttagatagtggaatgatggatccaaagaattatgcccttggcaagagtaatatcaatatgacaattaccaacacgctaagtgactatgtatatacaaatggtcctgtaagtccattaatgattgatgatgtcagtcccgagcttacaacccgtacttactttgaaagattcatcaaggaagttactaacaatcgtaatttaactcatccctcaccagcattcattttcacgatgaatagacaagaaagctctattaaatcacaattttctctaaagcctgaaattatgcgtcgtttatggtatttaagctttgaatctactttttcaggtgaaagtgatcaacgtaatgctgcattaactagcttatttagtcgtgcaaatgatgatctttttaaatattgtcaagttgaattagcaaaattctttactaacgttagtgttgaagatgcgcagaagattgaaagagacttcttatatccaatcaagcatgttttaaaaactgcacttgataaatttgatatgtataaccaagtcagcaaatattttgaagaaaattacgattactccctatttgttggtcgaaatgattggggaatgttaatcaatcaagcaaaaatcggaagcgatatcttatttattaaacaagatgaccggctaaaagcccaaatcaataaagaacttttcaataaaatctccgatcaaacggcgaaaaacagcggttctactatgcttgatcgctactttaaatatttgcctagaaaatatcacattgcatcgcaacaaactagcaccggttttattattgatgttgaaaactttgataaatggcttgatgatgatacgttaatgaataagtatcaaaacagtagttcatttagagataagcaacaaagagataaccaagcacaattgactcaaacagttgatatgctagctaaggcaatgttagaagatcgtgaacagcgacgaaaagaagaggctaaaaagaaacgaagctggcttggtaattttttccacagaaattagtttataaaagatttcatattcaaaataagacttttaacctcttaacagttaaaagtcttatttactatagggataataatgtttggactttgattgatattcttttacagaaattatcttattttgatcattaaattctataattgatacaccatcgaattcactaatttttccttgataattacatttaaaatgccattcggcaatgctcgtatcaccattaattatgagtctttctattggccaagcaattacttttccttgtttattccaattttcaaaccaagatattatctcctttttatttctgtaaactggaccatagcattcactataaatagcattttcgtcaaatgtattttggactacttcaagattaggacttagccatgctcgaaaataatttctaattatttgctctttatccatttatagcgatgtccagcctttcttgtgaaaatggttaaacaagtttttattttctcttaaaagttgcaaaatattttgtttatcatctactacaatattcttatcttgtaacaaacccataatcgaatttagttgctgatagtcgacatttccaagtgtcaaagtcatatttgttcccttacctaaatccaaaatcaaatttaaataatcaggattaaagtcaataggactaagacgtacatttttacgatagacaacggcagctttctttacatcagataaattaataacttgcttactctttttatgtaaccctagcagttgcatcaattttatcacatcgttaatatcataatttataattgtaatattttcgctactaatctgccaatacggattaaaacaagtaggtaaagttacaaatacacctaaaattagtacaataaggaatagccaccaagcttgataaccaaatcctgtcaaaaatagtgaaagtaaaactaccacaatcataccgattaaaacatggctcaatttaacaggagttccaacaataatttttttcatcacgttcaccttcttactttacttcctatataatattataaagcgctttcaaaaataaactatagaggttaaaaatatgaaaataggtattattcaagctacatcgcaaaaaagtaaaaatttcatattagagaagtatatcaaagaatctgtaggatccaatgatcaagtattcaattttggtatttatcaagatagttcggctagtctatcttacgtgcaagtttccctagctgtcgcattattaattaatagcaaggcgactgacttcattgtgacaggatgtacttctggacaaggaatgatgcttgcatgaaatacttttcctaatattcaatgtggttatatccccactccacaagatgcttttctttttggtcatatcaataacggcaatgttgtctcctttccactaggacttaattggggttggagtggtgaaatcaattttgagcagactataaaaaatctttttgaacagccttggggacaaggttatcctccttcacaagcaaaaagaaagataagaaatgctcaagaagttaaaaatctcaacgtaattagtaagaaatcaatgattgacattatacctaaaattgatcctgatcttattttccctgtgctcaattatgaaccgatttataacttcataattaaaaacggaaccgatcaaaaattaatttcaattatcaaaaggataaaaaatgactacaaaaattgaaaaaatatctcctaaaatctacaaagtaactgataacgataagcatctaggcactatttctacttatcacaatctttttcataacaaatatatttatctaaaattcaatctaagtgattactctgtaaatattccattttcaaaaatagttcaagcagagcaccaagcattgcaagtcatgattgattcaaatgaaaatccaatcgtagattttttattaagaaatggttttatctgcaaacgacactgttatacgcttaccgttaacaaaaaagatttaaaaattgagatcaataacaaattatctcttcattttttcaatacagaaagtcccgattacgaaactgtcaaatcttttgtgtaaatagttctttctcgtaaattgattttttaattatttatttaatcaaagtaggattctaaggtgtcctgaacctgaccaaagcctttatgaattcgattgaaataacggtcattgtagctcattgcctgaatgccaataaaagcatcaagcgactgttcagttggaaactctgccttaggcttagctttgcgcttgatcacattgttaaatgattcaatcatgttagtcgaataaattgaagctctgatctgcttgggatagttataaaagaccagcagatctggttctatgtctttcaagcttctgataacatggctgtaaaccttgccccatttggtatagaagtcatgcaggacagctgtggcttcttctttgtttgtctgttgatgcacctgtttgaattcgttcatgatcttttcacgatcgtcgacgcgtactttagcgcagatattgcgcatgacatgaaccaaacagcgttgaaaatgagctttaggataagtcctggccaaggctgttttcatgccaacaacaccatcagaaagaaaaagctcaacttgctttaagcctcgggatttcatgttttgaagcatatctgtccagacttcaatgttctcgctaggcgcaatgcagtagtcaatgacctccttgtgcccattaggcttgatgccaatggcaatatagactgcttcacgctcaaatgtttctcggcgcaaaggaaggtatgtcgcatccaaatagacgcagaaaaacttgtcgcttagcttgcgtttgtggtaagcctcaacctttggaatcatctgcttggaaatatttgatacctgagctggactgtaatggctgccatacatcttttcaattagatcggctatttccctggtggtcacgcccttggagtaaagcttgataatcatgctttccaagatatccgagtgctgcttgtagtcaggcagcgtgtgctgatgaaattgaccgttgcgatcccgaggcacttgcacttcaattgggccaaattgcgtatcaactttgcggaaataagcaccatttctagagttgccagtattccagccatttctggcatagggatcatagcccagaaaggcagtcaattcagcttctaacaagttattaacagcctgttgtagctctttgcgcaataaatcatttattttgtctggattgaatagagcttgagcaaaatctttggtaaaatcattcatgaaggagttcttctttctgtatgtgtttttttgttcaaaccaatcatacgagaaaggaactcctttttctaatgtttaaagaaataaatttaaggaatcattcatccttacacaaactattttacagtctatgcatctgtgcaacagtatgctttttcccgtcataataatatcgcttaacaattttatctctaacttgatcatttaagtcttgtacctgagcctgctgctgataatcaactaaagcactcacaccatagtcaactaacataatcagaaaagcaagaacattgattaaaataaacttagtccaattacgacttaaaaggatattcgtctcttcttgtacaacgtaagtattggtaattgataaagcaggaataataatccaaccaattgcagttaaccagaaacgaactggattggttttaataaaagctttcaaattcatcttactttatcccctttcttactttttaatttaatttcttgatcaaattttgcttttaattctggcgtaaagttgtgagcaatcatcaaaatagtttgatctgttttgagcaattcatcaatgattttttcggtagctttttgatcgatcgcactagttacttcatccattaaaacaaacgattgctcgtgtatttccgttcgcgctaaaacaactttttgccgttgtccaccagacaaattttcactttttagatcaattgttgtattaacaccatctggcattttggctaagtcggattggagttgaactgcttgaacaacatcttgaagcttatcctgcaaattttcgttaaacattgtaatgttctctttgatcgttgcgggaaaaactactggattttgcggcatattgccaattctagcttttccttcaggaatgatagtttcattttcatctagataggtcaccgtaccagattcaggttttagcttacctaacaaaacattaaacaaggttgattttcctgttcctgaatcgccagtaagcaaaactttctgccctttttttattgtaaaatcaggataaaaaattgtttccccctgatcgtattttacagacaagcctgaaactttaagaccgtaggctgatactttatctttattttcatcaggaacttgctttcttaaatcggtaatctgttcgcgtaaagccttagttgacttaacttgcgttaacgactgagtaatattccaaattgctgaaaaaatcgtaaatgcaaaaccactagcaactgcaaaatcaccgaatgaaatcatattaagcaaaaatatgattccagcaataaagctcataccaatttgtgcaattgaattgctaaaagcattaatcaaataacttacacttcttaattttgcactacccttacttgcgtccacataatcactacttgatcgatgaatttgcttaaccaaacgactgtatgcactataacgacgtagttcctgcaatccaccaagccaatgagcaattgtatttaacagcttttcattctttttatttactttatctgtggcagctgatgttttcttctccataattttaggagcaaaaagtgtaatcacagctaaaatggcagtaaccaaaattagaatccagttcatgcttgctagtaaaacaatagcaatcacaatctctaaaaccccacttaagatagtaatccaaggtgtagcataatcatctgataagatttttaaattggctgttaatcggttctgcatactagagactttttcatcacttttttcataatagtaatgatgcatgatttcttgccgaattttatgcagatagttttgcgtctgcctagtgaaaacaacggtagtaattggtaaaagcaacgaagtgaataatgctaaaacaaactgcattatttgccaataaacatatgtattaaaattaccagcagtaattgaattcagagcatatttaaataaatattcactaaaactcccaaataatgcgtataaaacatacaataagataataatgcaggctcgaaacgagactgtaaaatagtttgtgtaaggatgaatgattccttaaatttatttctttaaacattagaaaaaggagttcctttctcgtatgattggtttgaacaaaaaaacacatacagaaagaagaactccttcatgaatgattttaccaaagattttgctcaagctctattcaatccagacaaaataaatgatttattgcgcaaagagctacaacaggctgttaataacttgttagaagctgaattgactgcctttctgggctatgatccctatgccagaaatggctggaatactggcaactctagaaatggtgcttatttccgcaaagttgatacgcaatttggcccaattgaagtgcaagtgcctcgagatcgcaacggtcaatttcatcagcacacgctgcctgactacaagcagcactcggatatcttggaaagcatgattatcaagctttactccaagggcgtgaccaccagggaaatagccgatctaattgaaaagatgtatggcagccattacagtccagctcaggtatcaaatatttccaagcagatgattccaaaggttgaggcttaccacaaacgcaagctaagcgacaagtttttctgcgtctatttggatgcgacataccttcctttgcgccgagaaacatttgagcgtgaagcagtctatattgccattggcatcaagcctaatgggcacaaggaggtcattgactactgcattgctcctagcgagaacattgaagtctggacagatatgcttcaaaacatgaaatcccgaggcttaaagcaagttgagctttttctttctgatggtgttgttggcatgaaaacagccttggccaggacttatcctaaagctcattttcaacgctgtttggttcatgtcatgcgcaatatctgcgctaaagtacgcgtcgacgatcgtgaaaagatcatgaacgaattcaagcagatacatcaacagacaaaaaaagaagctgcagctgtcttgcacaaattctatgccagatggaataaagtttatagccatgtcatcagagatctgaaagaaattgagcctgatctgctggtcttctacaattatcctaagcaaatcagagcttcaatttattcaaccaatatgattgaatcctttaacaacgtcatcaagcgtaaagctaagcctaaggcagaatttccaaatgaacagtcgcttgatgcatttattggcatccaggcaatgagctacaatgaccgctatttcaatcgaattcataaaggctttggtcaggttcaggataccttagaatcttactttgattaaataaaaattaaaaaatcaatttacgagaaaaaactatttacacaaaagatttgacagtttcctcgaaacacattgcttttaaatagctcttttaaactcatacttctcctccattaatcattaataaaaatatttatcatcctttaatcttactacgcaaaaataattttttacacatatttttttaatttttaagctaaatcatatttcataaacataaaataagactagtaatcaattcaaattgactactagtctctttgtttaccaaaaactacatttttcgcaaaacgtcgatcaatacacgacgtaagtcttcgttcttcttacccatttcttcgatcaatctagctttatcatctaaagcctgattatatttatcttgcaaagcattatatctttgctccagttgattgtaatttctgattactgtattgtagcgttcacgcaaaccgctagcttcatcaaattcataattattccgattatcataattatttcgattattatagcggcggttagactgattattacgtgagcggttattattttctcttctgatctcaaaaggatgcttattttgtcgcttacgttgattttgcgtttgattattattatttcgattattgctattcttctgattattcttacgctcaaagtccttagattgaccttcacgactttcattctgatccttagaatgttgctcaggcttttctttagtttctgtttccttattttcagccgctttttcagcattcttgcgatacttttgatcaatcttgatattttgataaaaaggactaagttcagctataactttttcaccatcttcaaccgaaaaacttccccgcttgttaactggcttaataaagttggtcttcacaattgaagcaatcttatcctctaatttcttttgaatagatttatcaatcttatcattctttataactttagctaaaatcttacgcttagtaattgtcttaacccgcttagatttagaagctggcctcttatcagtagcatcctctttagctggggcttccttagcacgacgttcaattgcatctgcgtaatcttgtacattaccaataattaatttagcaacagccggcttaaaatattttcttcttcgcacagtaatacttggttgtttacgtgtacgcacaaagttataaattttaatctttagtttttgttgtaattctttacttgcattaggcaacaattgatcaatcatttgattcattgttaccatttcatttaaatcaatattttgttgttctaataatgtttgctctactattcctggcatttccaatcctatattcttttaattttttcacaacaaaaagggccattacggcctattttgcaataatacatcaattttctcattaataaacttaatgcactttccattttacaacattaacgctatttacgaaaagggctacaagcatattctctattttttaaccaaaacaagcagcatcccatcgatactgctttattttatgcgcagttgcactagactttgactctatttctattttacgtgctaaccagccttttgagactgtaaaatagtttgtgtaaggatgaatgattccttaaatttatttctttaaacattagaaaaaggagttcctttctcgtatgattggtttgaacaaaaaaacacatacagaaagaagaactccttcatgaatgattttaccaaagattttgctcaagctctattcaatccagacaaaataaatgatttattgtgcaaagagctacaacaggctgttaataacttgttagaagctgaattgactgcctttctgggctatgatccctatgccagaaatggctggaatactggcaactctagaaatggtgcttatttccgcaaagttgatacgcaatttggcccaattgaagtgcaagtgcctcgggatcgcaacggtcaatttcatcagcacacgctgcctgactacaagcagcactcggatatcttggaaagcatgattatcaagctttactccaagggcgtgaccaccagggaaatagccgatctaattgaaaagatgtatggcagccattacagtccagctcaggtatcaaatatttccaagcagatgattccaaaggttgaggcttaccacaaacgcaagctaagcgacaagtttttctgcgtctatttggatgcgacataccttcctttgcgccgagaaacatttgagcgtgaagcagtctatattgccattggcatcaagcctaatgggcacaaggaggtcattgactactgcattgcacctagcgagaacattgaagtctggacagatatgcttcaaaacatgaaatcccgaggcttaaagcaagttgagctttttctttctgatggtgttgttggcatgaaaacagccttggccaggacttatcctaaagctcattttcaacgctgtttggttcatgtcatgcgcaatatctgcgctaaagtacgcgtcgacgatcgtgaaaagatcatgaacgaattcaaacaggtgcatcaacagacaaacaaagaagaagccacagctgtcctgcatgacttctataccaaatggggcaaggtttacagccatgttatcagaagcttgaaagacatagaaccagatctgctggtcttttataactatcccaagcagatcagagcttcaatttattcgactaacatgattgaatcatttaacaatgtgatcaagcgcaaagctaagcctaaggcagagtttccaactgaacagtcgcttgatgcttttattggcattcaggcaatgagctacaatgaccgttatttcaatcgaattcataaaggctttggtcaggttcaggacaccttagaatcctactttgattaaataaataattaaaaaatcaatttacgagaaagaactatttacacaaaagatttgacagtttcagccttttttctagttttattttcttaactaatccattaggttttacatataaattcttaatattatttcgctattataagatcaattaagatgaaaggaatgagaaccttgattaaactactcttaattggtggatcatttttaacgcttggtttaatggccatcagctcagtattaattaataaaccagcagtagcaaaggtaaaacatcgccactaaaaaccagaataatatatgttaataaatcttttcccctctaactagaaagaccaggttatgtactccacatagcctggtcttcttttcgtcttattctttatggttggtagaaaattgcaccttggtcaacaattacatctggttgcaacttacgtaaactcttactttcaacacaatattttgtattattcaaatactctttgaagttcttagtttccaagtgctgcttgtaagcttcattattacgataaacttcaatagctaaccattcatttggttgatcggcaacagttcctgcaatcattgccaaaatatctttttcttcttcgactgccgttttcatttctttcattacagcatgagcaaactcatcgcccttacctaaagaaacaccaatttcagtcagataaataacataatcatttgatccggtaactgctagtttttctgcctttgtagaaataaattccggaaacaattctacctttactcgactagttaaaatatctttagcaacgtcagtaaaatccttaaattgctttgaattagcatgagtatcataacttgcttcgtcttgatagcattctactacaaaattagtagtttcttcgtcatgacttgtctgcataaacaatgtgcctggttcgttttcttgagaagtaagcatattatgttgccctgccttaacgaactttgcatgatcctctttattagtttctagtttatataaacgcaaaattggtgtttgttttaatttcataacttctcctccaagaattaattttgtcattattatactaaattttatcgcgtctattagtaaaaaacatcccttagttaagggatgtcacaaaactataacgtgtaattaactttcttaaacttgtagtccttcatttttttagctaatttcttgcttctgaagtagttaccaccatcatatctactagaataaaccagcacgttatgctttttaccattaatggtttgtggtaccactcgataaagactccaattttcaaaagtaatccacggatcaatctcatagaatgtatcattcttcattttggtagttttaccagacatccagttttgcgttaccttatcaaagttcttctggttagcaattctaccattgaagtaatcactaattgtcgaagcctcctgggtaaatattggtttgccattaacagtatgttcagtaaaggtgatctttgtgccattatgtgcattacgatcataagagtaccaagtaccctgcatcttttttggaatagtaacctgtacaccattaccataagttgaagcatcaacagtctcaacttgactagccaaaccagttaatcctaaaacaagtaccattgatgttaaaggtaacaaagttctttttagcataaaaatcatctccagaatgtaaaatatatgagtccgctttcataatatattttacagtatcttatagtacttagacaagatatttttaactttacagattaatattcttgctgcaatagctttataaactcactacttaacgctgaatttgacttataaaaagccattatcttttgctttattaactgaccatgatcaagcaagaaaagtggctgcaaatctgtagtattaattaacctagccgtattctcatttaaaataaaatagccagacctagaggcgaccaacagtgctgcttcttcgaccgagttagaagcgatgaattgactgccaatttgatacaaatctttaaataaatgtagctcactaacctcttcttcaggtttagccacaataaaacaagtcatatcattgagctcgtctttttcaatcatttgaatgccattaggatacattcccttgggcaaaattgccattacaccagcttgagtcaattctgtttcatcaaagttaagattctcgtcacgcaaatcattgattgctatgtctgcttcatcttcattcagttttgcaaaagcaccatcatgactagtcgcaagtagttttacatctacattaggatgttttaacacaaaatgctgcactgcctgatctaattccttacgacctaattggtcaaaatatgcaatctttaattccgtcattttatttttcatccagcggtgcgtgtccttcttctgctactcttcttttatccttagtatcttcatgcttattaagtgccatcaaggcaaaaaagatcaaattcaaaccactaactacaatgccaaataattttattaaattgagtttcttttctttactcattttttaacctcacaactaaaaataatcataaaatgatacatcgcctttaacgaaatctaattttttgatgcggtaatctgtaattaatcctagtttaacagcagcattcatggttagtctacctaatagcacctgggtccacgcggtaattgatcccgaaaaatcaaccaatgcatcttccttacgttctaccgctaccttacgtccatgattacttaattgccaaactccaatattccaaggacactgttcatcgctattgacttccagattaaaatcaccttcttgcattggccgcatacaagccaaaactttttcaaaatcaataattcgactcatcatataaggacgcaaatcaacttggagttcgttttgttcaggaaaaagttcagctcgtaacgatttctctggtacgctcattttaaattgcttaacactgcccgcgtgcgaacccataaaaccaaacatactcagtaatccctgcggcgtaattgcgtacatttcatcagctaaaaaagtattgtctctaatgcgataaatcaagtaactaattggccgctcatccgcgtcaaaataaacggctacattgcggtgatgataataagaatcaagtctattccaccaccatgcctcacgtacaaccgtgttacgttcatcatcagtatgcagttgacgttcataaagttgaatcacaccattttgaacagctaaattgtcccacttgccacgcactatatgaccagaacgtggtaatttaaaactacgcaatgcgcttccatcaaagcgatattctttttgataaatactattgctaaacccgtactggcgataaaagctctccgaaaatggtgccaggttagcaaacggaatatcttgcctatgtaagtcatgcaaaatttctttcattaattgggaaatatgaccttggccacgatactcaggatatgaagctacataacctattccagccatcggtaaatgatgcccaaaaacatcacttttaaatcgattaaccataatatagctagctaatttttccttatcaaaatagccataacctgtactatgatcataacgactcataaaattttcgtctttagtcaaatcattatttttcaaaaatgcatattgaattaatgccgtaatttgctttaaattattcttatttttctttaattccatgcttattcctatacgtacatctataaatttattcattactattttagttcattttttaaatttttaactagatttttcataaaaataaaccggaatcataaaatcccggtttattttacgcaacgtattcttgataaagctgagagataaatgcctgcatctgttccactgaatgtctccggctacgagcacattctttagcagggcgatcacataaaaagcacttacgtggctgcctgcccaaatctctgcgtgaaattgcagcttgtttattttttaccaacacgtctgcatcaaagagacgtcccaatgatatctgattctcaaaatcaattgttgagcgctttactttttcaattgacaaagataatacataaaagttttcacagccactatcatcattaagctgtgtcaccaatttaaaatgataacctaggttagtccaagcattttccagctcattgatacccaacataaacattttagttaaatagcgattattcttgattggtcctgggatattcatattaatgtcgactagagtttgattaggatacttattaaaaatcttatgttgtacagctactcgcctatctttagctgctaaaacttgggcaatatcctgcttttttccttcattaaaaatattcatttttatcacccagttaattataaatgattgtgccgactccgtctgctagtttgttggcattgctcaaagaggtgataattgctaaattacctgttttttctacaaattcaattgcagcttctatcttaggcttcatactcccagctgcgaaataacctgctgctagatattgtttgagctgttcaacttttattttaccaattgcttgttgattttctttgccataattcaaaaatgcatgatccaccgttgttagaattactaattcatcagcgttgatatcttctgccattttagcagcggaaaaatctttatgaattacgccggcaacacctctgagatgcccatctttcacaataacaaggatgccaccaccgccacaggcaatcggaataaataaatttcctaaagtagccgccatcactgctttaattgaatgcaatcgattttcagcttctgtaaattgccaagcatactttgaattaaagacctcatcagttacttccatctcatttaagccatatttttcatagatttcttctcccacctgagttgttcgatcatgaaaagctgtcaaacaatgcataaagatcaattggtcatctggtgtaccagtcatttgcatcattttcattgtgaccgtatatggctttaataatttaattcgttcagaccaatcattttcacccatcgaaaccccaacatcggtataaacaacattggctcctttaacgccttgagcaatatcatctgtgatcaaattttttgaacctgaatcttgggcaaaattttgagcaattttttgtacatcaggatgtgtaaacaaaggcttgggtgtaacaatatgtacattaacacctaacattgagccacaaactaaaagactgtcggcaacattatcgcggccatcacccacttccaaacaggaacgccagaatatttagccagctcttctacatcttcttgagcaaaaccgcgatattcaattccatcatacattgagcctaggactttagccgtatccttgacgctttcttttttacctaagtggatctcgcttgcgcctagatattctggatgagcacctaaatcattacaagctactacaaaagcagatcgcgtcctagttgaggctttttcaaaaagtagtgcaatatttttacctttcagatattcatgtgggatatgctcttttttaagttcttttaaatgtaatgcaaaatcaattaaatatgaaatttcagctggagtatagtctttacaatcgagaaaacttctaccttgaaaaacattttgtaaatatttcattttttgcctcttataaatcttcacgaatcaacggacacgacatacatctaggaccgccacgaccacgtgagagttcactagaccgaatctcatgaacgatgatgccatgttttcttagcaaatcattggatacataattacgatcataagtaacgacttcacctggtgcaattgccaaggtatttgagccgtcattccattgttcacgtggtgcggcaattggatcaccaccaccagttggaattaaatccaattcgcttaaatgtaagttttctttcaaaacctgcaccaaatcattcttttctgtgatttttacaccgttgtgatcatcgggctgtagaacataaatatcaattttgccggctttatctaaaataaagggatgaaccgtaaattgattataattaatcattgtaaaaactatatcaaggtgcatcatagcatgattgtgcggaatcttaatcgctaaaatcgtatcataacttgaatgatcaaataaattatgagctaagtcagtaattgcagttgcagaagtgcgttgtgaaatacctacagctaacacatggttatttagaactagttcatccccgccctcaaggcgaccatgatgataacggtcacgccaaactggaatagttgcgttcttgaaatcaggatgatttttcaaaattgtttccataaataatgattcacgtcgtctagctctgaaagtcatccggttaatggtcatccctgaaccaattgcagcctgttgatctcgagtaaaatatacatttggcattggatcaagataaaaagggtaatctgggtcctcagccaaatctgctaaagatggggtagaattatgaatcgcactttttctaattccagcaatcaccgtttttaccatttccttagttagcaattcttggagatagttcagcaataattgatgcaaaggatcctgttttttaatacttgattcatccagtaactgatctaagaatgcccgacgaactttctcatctgttaaagattctgctaataaatcctcaagatataatactttgatcccctgctgcctcaatacatgcgcaaaagcatcatgttcttcttgggcaatcttcagataaggaatatcgtcaatcaacattcgatgcaaaatatctggggctagattttctagttcttttcccggtcgatgtaacatcaccgtttttaacttaccaatttctgaataaacatgaatcggactcgacattcaaccaccttctattaattattgtacccgtttacatttattatggatcaattaggtaaaagttacagtattatcatattgcagcaatgatttttttcattaaaggtgtaacttgatgatctttacgccaaaccagctgcaaatgtgttatccaattagcatgtttaattgcgatcatattttcttgggcataagttgtcgcaattgattctggtactagcgctactcccatttttctcttggcccaagtaattgctgtccgtgaatcatcacacttaaccgcataaaatggtttaagcccatgatgtgcaaaagtttgattaaaaatatcctcaaagcgacgataaataatcaatggctgatctgctagatctttaatgcgtaattcttttttttgctgaaaatctgggtctacactaatagccatcattttttcagttgttaaagtcttagtatttaaacctgtctggttgtaaggcgttcgtacaatgcctagatcgattgtctttttttctaatttatccaggatgccataagtattatcttcataaatatcaaaagaaatttccggataatattttcgtaattcattaaaagaattcattggtatcaagcccgttgaggaagatgccattccaattgcaatcgttcccaattcaccggaaatagtcttatgtacttggttttcagcattttgagctagagaaataatttcattggcatagctttgaaaaatttgtcccacatcagttagctcaataccatgtgccgttcttttaaataattgcgcgcccaactctttctctaattgttttaattgatagcttaatggtggctgtgcaatatacaagcgcttagcagctgctgtaatctgcttttcttctgctacaactagaaaataacgtaactgttttagattcatattatttatcctttttttatttcaattgatagtgatattaaaatatttaatatcttatattgtattttagtattttattcatagcaatatctgtgctaccttattaaggtagatttggagggaaaataatgtctgataaatttcacggcttaactcaagccgaagcagacaagcgcttaaaagaagatagcttaaatgaagtaccagagcctgaatacaatttctttaaagagttcttgtctaagttatggaacctatccgcttggattctagaagctgctttaattctagaatgtatcttgggcaaatgggtccaatcattattcgtgttgttgatgcttttatttgctgcatttaacggtgcatctaagaaaaagcaatcaagacgagttttaaataatatttcacacaagttgactcctactgtatcagttgaacgcgatggcaagtggatcaaacttgattctaaacaactagttaaaggcgatttaatctcacttaaacgcggggacgtactcgcagcagatgttaaaattgttgacggtaacttagcttgtgatgaaagctcaattacaggtgaatctaaaccagttaagaaagcaattgatgacaccgcctttgccggtactacagttgttgaaggtgatggcctagctgttgttactgctacaggtaaagattctagaagcggtaagacgattaatttgatcaacaattccgctgctcctggtcacttacaacaacttttgactaagattatctactacctttgcttactagatggtgttttaaccttagttattattatcgcctccttcttcaaaggcggtaatttcaatacctttattaatatgttgccattcctggcaatgatgtttattgcttcaattcctgtagcaatgccatcaacttttgctttatccaactcatttgaagcaacccgcttaagtaaagaaggagtcctgacttctgacctaactggaattcaggacgcagctaacttgaacttgcttttacttgataagactggaacaattacggaaaacaaaactgccgtagccgcttggactgatctaagtgacttgcctgacaaagacgtgcttgctttagctggagccgcaactgataaacgtaatgctggtattatcgatacagcaatcgatgaatacttagtagaaaataacattccagtcatgaatgctgaaaactttactccatttacttctgacactggttattctatggctgatgttgctggacataatgtaaagcttggttcatttaagcaattatctttgatcgataaacatgccgatgaagaaatttctggaattaatttcaaggcaggacgctcagtggcagtcttgattgacgataagttagctggtgtcttcatcttacaagataaagttagaacagactctaaagcagctttggctgaactcaagaaacgtggcgttcgcccaattatgttaactggtgacaatcaaaagaccgctgctgcagtggcagaacaagttgatttaactggtaaagtaatttcgattcacgatttcaatgaaaatactgatattaatgatttggccggtattgctgatgttttaccagaagataaactcaagatggtaaagcttttccaagaaaaaggctatatcgtagggatgacaggtgacggagttaacgacgcgcctgcattaaaacaagctgaagtaggaatcgcagtttcaaatgctgctgacgtagctaagcgttcgggtaaaatggtattactagacgatggtctaggctcaattgttaaaattttagacgctggacatcgcgtataccaaagaatgactacttggtcactaaccaagcttgctagaactgctgaattaacgatgctgttaacttttggctatcttttctttgactacatcccaatggccttgaatgcaatggttatctataccattatgaacaatatggttacgatgatgattggaactgacaggactcacattacttataagccagaaaactggaatatggctaagcttgctaagatcgccttttcactagctgctggttggactttaattggtattgggtttgtttggttcttaaacacacacggttggagtcacggtgctgtttctactatggtttacgtatacctagttcttagcgcaatgttgattgttttgattactagaactcgtaagtacttttggcaagattacccatccaagttggttggtagtgttcaaattgcagatgttctattgacctttatcttagctctttgtggttgggcaatggtccagatttccattcaaaacttagcaattactgtaattgtagcgattattgctgccataataatcgacttaatttaccaacctgtgatgaaaaacaggtagattattaccataaattttataaattaaaagacttctaggaactttgaactcttagaagtcttttaatttatctttttgattcacgatatcctgctgcacgtgctgctgctttactcttgaagaaaactgcattttcacgattcattcgataattatgaccgcgcattacgtgaaagatttttgatcgtttattatcaacaattctgtaattactggtataaatcttagttttatcacgatattgatgctttctccttctgtgatgaatagctgcattaacaactgatgtcgacccctgcaaatttgcaggcagaacactgatttctcccactaacatcagaaatgcaacaatagtcacaacccaattcttgcatcttttcataaaaacactcccttaatatgtcactatatttatatagtatacgtttatatatgaagtgttcctacgtttattagaaactagtttgaaactgtcaaatcttttgtgtaaatagttctttctcgtaaattgattttttaatcatttatttaatcaaagtaggattctaaggtatcctgaacctgaccaaagcctttatgaattcgattgaaatagcggtcattgtagctcattgcctgaatgccaataaaagcatcaagcgactgttcagttggaaactctgccttaggcttagctttgcgcttgatcacattgttaaatgattcaatcatgttagtcgaataaattgaagctctgatctgcttgggatagttataaaagaccagcagatctggttctatgtctttcaagcttctgataacatggctgtaaaccttgccccatttggtatagaagtcatgcaggacagctgtggcttcttctttgtttgtctgttgatgcacctgtttgaattcgttcatgatcttttcacgatcgtcgacgcgtactttagcgcagatattgcgcatgacatgaaccaaacagcgttgaaaatgagctttaggataagtcctggccaaggctgttttcatgccaacaacaccatcagaaagaaaaagctcaacttgctttaagcctcgggatttcatgttttgaagcatatctgtccagacttcaatgttctcgctaggcgcaatgcagtagtcaatgacctccttgtgcccattaggcttgatgccaatggcaatatagactgcttcacgctcaaatgtttctcggcgcaaaggaaggtatgtcgcatccaaatagacgcagaaaaacttgtcgcttagcttgcgtttgtggtaagcctcaacctttggaatcatctgcttggaaatatttgatacctgagctggactgtaatggctgccatacatcttttcaattagatcggctatttccctggtggtcacgcccttggagtaaagcttgataatcatgctttccaagatatccgagtgctgcttgtagtcaggcagcgtgtgctgatgaaattgaccgttgcgatcccgaggcacttgcacttcaattgggccaaattgcgtatcaactttgcggaaataagcaccatttctagagttgccagtattccagccatttctggcatagggatcatagcccagaaaggcagtcaattcagcttctaacaagttattaacagcctgttgtagctctttgcgcaataaatcatttattttgtcttgattgaatagagcttgtgctatatttttggtaaaatcattcatgaaggagttcttctttctgtatgtgtttttttgttcaaaccaatcatacgagaaaggaactcctttttctaatgtttaaagaaataaatttaaggaatcattcatccttacacaaactattttacagtctcactagtttaattacttatcttcatttgcaccaaaaatatccaaaaattgtaaaaacaagttaacaaaatcaagatataattgcaaagcacctaaaactgcaagcccattagttgaaagatcatcaccatattgtaaataaatatctttcattctttgtgcatcccacgcagttaaaatagtaaatataatcacagcaataatcgaaaaaacgtagtcaatgattggattatgtaaaaacaaattagctaacatggctacaatcaacccaattaacgcagcagaagcataagaccctattcgactcaaatcttttttggtaattgttcctaaaatcgccattgttacaaagacggttgccgaagctacaaatgctgaagcaatattttgtccactatatgcacctgcaataaaagcaaaggtaacgccgtaaacaattggtgttgtgcaataaaggcagagataggtcccgcaaaaaccgtcattgtcaaataagcactaattgctgaaacgaaaaccgctaaggccatataaccatatattttgctaaaaaacatttaatcctgaatcattagcatattgctgttgaccagattcttgatcaaaattatccatcttaatttctccttcttaacacataccctgtactttaaatataacacctgtttaattaaaaacgtagcgagacaccctaccaaaatataaactatctcggtcactttggactagacctacaataaaaaatatcatataattggtatagacaattatcaaaaatgaggtactattatgacaatgagatctttaggtctgtcaatttatccaggccacagcaaatttgaaggcaacgctcactatctggacttagctcacaaatatggcttttctcgtatcttcatgagtatgcttgaagtacaaggcagccctgaagaaaccaaagctaagtataaaaaaatcattgaatatggcaataaattgggatttcaaacttttttagatgttaatcctgcaatcttcaaacaactaggtgtcagctatgatgacctgaaattttttgctgatattggtgcagcaggcatccgtcttgacacaacatttgatggtgcaattgaagcaatgctttcttacaacccatatggtctaatcattgaactcaacatgagtaataatgttgactatcttaacaatattatttcttaccaagctaatacaccgtttatttatggctgtcacaatttttatcctcaacgcggtactggcttaccttacgacttctttatcgcttgttctgaacgcttcaaaaagtttggcattcattcagccgcttttgtctcaagtcaagtaggtcaaatgggaccttggaacgtggaagatggtttaccaacgcttgagcaagaccgtaatttaccaattgatgtgcaagcaatgcatctctgggcttctgggttgattgatgatgtaatcatcggtaatgcttatgccagtgaagccgagttaaaagccttatctaaagttaatcgctatcaattgatgttgcacgtaaactacgttactgatgttaataagattgagaaaactatcgtagaagcgcctcaacatttccgtcgtggtgatatcactaaggatgtaattcgttcaaccatgccccgtgtaacttatgcagatattcctaatccagtacacgacaacaatgtagaattccaacgcggagatattatcattggtaacgacaactttggtcattacaaaaatgaactacaaattgtccttgaacctcataaggagtcaaggatgaacaaagtcggttctattagatcagacgaattattcctgctcgactttattaaaccatggtcaaaatttaaattaatcggtaacaaataataaacattctaagctaaatagtgaattagttatccgacgggataattgattcactatttttattcttttgtagaattaaagtagtggtaaaacgatatgccctgaggtctttagacacttgatgtcgcataataaactggcagttttacttaagttttcaatagtctcttcgaagaatgtggacactagatgtcgagtttagaaaattagatctgatttcttaagtaaatacgttttactactaagttttggaggtttttattatgcaagttacttttggaattgatgtaagcaagtctacttctactgtttgtgaactaattggtgaaagcaaaaatgaactaaccattactaataatcgtcctggttttattcaattgcttcatgaattaaccgctttttctaaacatccgcaaattatttttgaagctaccggtgtttattcacgcagactgcaggcttttcttgaagactacggctatgaatatgttgttattaatccgcttaaagccaaaaaagagatgaatatggggctacgctacaacaagaccgataaaactgatgcttatcatttagctttaattcaaagactttatcgccatccggttaatcaaagcgaatcccaaacttataagcagcttaatgctttgagccgcttctatgaccagctgacaagtgacttggtaatagctaaaaatcgacttcaccaagctctacaatcgacttttcctgaaattgaaaatttattttcttctgctaaaggtaaaaattactggcaaatagttgtgcgatatcctcattgtgacttagtaagaagagaagataaaaaacagcttattaactggttaatgagcttaaaggggattgcttttaaacacgctctaaggactgcagataaattaattgaattagcttatcaagcttatccagttgtatcttgctctagcatagaagtcgagcaagtgcagtattatgcacacagattgcttaatttaagtgatcaaagagaaaatttaatcgcaagaatggttaagttagcgaagtctttgcctaatcatgatttagaaaacctagaaagcattccaggctttgcacagaccactgctgtcagagttttagcagagttaggagatttacgcagatttagtaatcctaataaaatcaatgcttttatcggaattgatccaggcagatatcagtcaggagaaatggactctaatttaagtattactaaacatggcaatgcagtcgcacgtaagttgctttatcgagctattggacaaattgataatgcagctaagacaaatccgtgtcatatagcagattattatgaaagcaaaaagctatcctctcaaaccaaagggttcaaaaagatagctattgcttcaattcataaactaatcagaaccatttatgccctgattatcaatgatcaaccatatgattacaacgtagccacacataatcaaaaagactttagtcgtaattaattgatcaagtacattataacgctaagcccaaaaatcagatatggatctgggcttatttgtcgtgtctaactaaaaaaataaatcgacactaaaagatgtttaagttgaaatttaaacaaaaaatgaagccaaacttcttattatgcttgactttacgtagaaaaagacctaaaagtgtctaacttttaggtctcagttcaaattgatttaattccctctttttatttattctattttaagcaccatgatattgaacaagtgaataaatatcaacatcaggtaatttatctctaccgtgtaaatctggcaattcgatgtagaatgcggcaccaactaacttaccaccaaggttttcaattagctctttagaagctcttaaagtacctgcggtagccatcaagtcatcacagacaaccactctttgtccaggtttaatcgcatccttgtgcatttccaaactgtttgaaccatattccaaatcataggaagcacgttcaacttctcttgataacttatgtggctttcttgcaggtacaaaacctaaacctaactcagtagctactggacaacctacaataaaaccacgtgcttcaggcccaacaattacatctgcttttttactctttgcatattccgctaattcatgagtagcggcacgatacaattcaccatcttgcaaaattggtgtaatatcgcgaaaaacaatgcctttgttaggaaaatccttaacacttgcaatatatttactaaaatcaactgccataagaagcataacctccaaaatgctctgtgtttgtgttcaaacgcttttgaccagtatattttaacaaattttaacgataaaagcactgaaaacagaatagttatctatttatttgtcaaattattaacatatgtaatcaaacgttgactaggcatagttcttagttgattaacaaatttaatctgagaagaagttcccattaaatatttagaagctgtcagcggctgttttttaggagaaggctctcctaccaatttaccttcatccaattttacaaagcctaattcaaagaaaactcgtaaaatgaaaagcacactatcataatctagtcccaaataaggtgcaactgtacggtaatctgctggctttaacgtagggtgactataaatatattttaaaacagcaccaaaataatttttagcgggaatttgttcaacaggcaattgatcaagcaaaaagcgtaaatagatttgttgataatctttctccaatgcagcatttaattcaatctgattgcgtggcacatctaataatgcaactgtttcaccagtttgatcataatctttaactaaagagatcttgtcttcatcgatctgtagtcggttgcgaacaatcggaatatttttttgatcaaataacaggtagcggtccgcgaaacccataacatatttctcttggcgtaagtcaacaactggcgttggcactgccaattttggtgaagcaaaagctagtccggtcatgattccttgtaaagaaacttgatttcgataagtatttaatgataattgaacaaaaatttgagaaataaacggcaaaagattattattcaaaaagcctttattaaatccaataactgataagttaccgccttttttagcaaccgtaaatttgacatgattcttatctttacccattttaaagaaatgagtgattgttggattagagatactaaagattggctgcgtgtcacctgtcccaaatggacctacttgattgatttgtgctagtgtctgcggagttaagccctgcataggcaattccatgtcatattttttagtctcaagaccaccttcaacatgaaagtcatcttcaaatttttcccgtaatggcgcaatctgattttcttctaatgataaaccacaggcaaaatcatggccaccaaatttggttaaatattgatccttgatcggatttaaagcatcaaacaagttgaaaccagcaaaggacctacctgagcctttaacctcacctgcatcatttttagtcaaaacaatcgtgggtttatgtgtcttttcaacgatcttattagctactaaacctaacacaccttcgtgaaattcagggtcatataaaaccaaagtattttgtttttgccagctatttttatgaattaacgtcatacatttgtcatagacttcggtggttaattctttccgtttattgtttaattcttcgatcttatctgcaattttttgggcctcaaggtcatcatcacttagcaaaagctcaactgccaagttggcattatctaatcgacctacagcatttaatcgaggagcaatattaaagccgacatcagtttcattaatactgcctaaagtcaaaccagcatttttgattagagcgcgcaagccaggacgatctgtctgattaagcatttctaaaccacgcttaacgataatatgcccctctccggtcaccttaaccatatcgccaatagttccgatcatagccaaatctagcagctcaggcatagtatcctgcattagaccacgacaaatcgtgtaagctactccggcaccacaataatcatcaaaaggatatttttggccaggataattacaatgaacagtagcataagctgccggtttcttttcttgaaaagtatgatgatctgtaatgattacatcaacattatgttcttgagcatatttgacttcctcgaccccagtaacaccattatcaacagtgataatcaatctggttccatcagctacaatatcttgatagcggtccatattaggaccatacccatcattgaagcgattaggaataaaataatgaacatcagcgcccaaaatgcttagggtttcagtcataatagtcgttgcagtaattccatcagcatcataatcgccataaattgtaatcttttcgccgctatcaattgcttgattaattcggttaattgccttatccatgtcatgcattaacgctggatcagccagattttcttctgttgcattaaaccaaaaatcaagtttttcgtctgtattaataccccgcaatgcaaaaagtttggctgcaatgggacctagttgatatttctcaatcaagtctggtgctaattcatcagctgttctttcttgccatttcattaattatcaaacaccttatgttctctcatcaaaacgaaaaggcactcattgttgagtgtctttattacaaaatctatttataattttatcgcaaatctaaatctgattaaagattgtaaatttttattttaatttaaaaaccttaagattattgttgttagccttttcagttttaatcagattaccccgaattgcccaacgattcttaccgccatcagcacaagtaatcaaagttacaatattcttcttagtattatcgactagccaaaccgcagttggatcaacaatctttttcatataaattcgatagacatatactttgttaagattagttaaataaactaactcaccttttttaacatcttcaagtggtgagaaaagaataccttttgctgtcatgtagtgacctgcaagaggataatttcccttacccattacttggtcggctcgcatcgtgccgccaccagtcgacattgcatcatcactcatccccaacataatcggtaaatacatattaacatcgggaatagctaacgcaccaatcgcaccagaagtctttttcacttgtgatcttgctgcttgtgcaatgcctaaagacttaactttactaaaatcatacattccttttttctttttgttttcttcaattgtctttctatttattccacttaaagtagattgttgattatgatgaattaattgatcactgatctgtttgttaaatatcaaagcaataccaacaagcaataatatgatagcagcaactctaagtaaaattgtacttacactattttttttatttttagccatttttatttaccgttgatgtcatcatcgttcatcttcaagactgccatgaaagcatcttgaggtacttcaactctaccaactgctttcattcgcttcttaccacgtttctgtttttcaagcagcttagcccgacgatctggatcaccagtatggattttccaggtaacatcttttcggtatggcttaattgtagctcgagaaataattttagctccaattgcgccctgaatatcaacttcaaagttttgccgtggaattagtttttttagcattgaagtcatttgacgggcacgatcttgagcttctgatctgtgagcaataaaactcaatgcatcaattggctccttgttaagcaaaatgtcgatcttaaccaaatcagtagcacgataacccgtaatttcataatcaagtgaagcataacctttagtcgaagatttcaaatcatcaaagaaatcaaaaataatttcagctaatggcatgttgtaaattacattaactcggtacttatccaagtaatccatggtaacgaattcaccacgcttacgttgacaaagctccattactggaccaacaaaatcatttggcaccataatttccgcttttacataaggttcttgaacttccttatattcaccagcatctggcaaatcagatggattatcaatcaccttggttgttccatcattcataattgcatgataatcaacagatggtgctgtcatgattagatcaaggtcaaattcttgctctaatctttcctgtacaacatccatatgaagtaagcctaagaagccacaacgaaacccaaagcctaaagctgttgaagtttcaggctcaaattctaaagctgcatcattcagctgtagtttttgtaaagcttccttcaaatcttcataatcacggttgtcaactgggtacatcccagaataaaccatcggtggaatttgacgatagcctggaagtggttcagccgttgggttatcagcttgagtaattgtgtcaccaacacgtgtttctcgaacggacttaatgttagcagtaatatatcctacatcccctgcgattaaaatatccttcttaattggatgaggactagaaacaccaacctctgtgacttcatattccttgccagtattcataatttgaattcgatcgcctggtttaatagatccatcttcaattttgacagacattaccactccgcgataatcatcatatttagagtcgaaaatcaatgcttttaatggagcagtaatatcaccagacggagctggaatatctttaactaccttttccagcatgtccttaataccttgaccggttttacctgaaacttcggcagcttctgaagcatccaaacctaacatttcttcaatttcttccttagtcttaggaacatcggcagatggtaagtcaatcttgttaattactggcaagattgccaaatcgtcatcaattgccaaataagtattagccaaagtttgagcctgtacaccttgagaagcatcaaccaccattaaagcaccttcacaggcagctagagaacgtgatacctcatatgaaaagtcaacgtgtcctggtgtatcgattaagtggaaaatgtagtcttcaccgtcttcagcatgatatttcacttcaactgagttcattttaatggtaataccacgttgacgttcaagtggcatatcatctaacatctgatttttaagctgacgttgactaactgtatcagttaattctaagattctgtcagcaatagtcgatttaccatggtcaatatgcgccacaatagcaaaatttcgaatgtgtttttgatagtcttttaatttttttaaatccataaaatcgttcaccctttactatgtattaattatagcaaagctagaataaatgatgaaattgtagcatagtaaattttcaataaaatgcagagtttttagaataataattgaaaattcagcattgaatattttccaagaaaaactctaaaaatcaccaaaaaattaattgatcttaaaaaaggtttctgttgcaagtagcagaaacctttttagcatttacatattaaacttatcttttaagcgttcaaaaaatcctttttcttgtggtgtaatattgccaccaccatcatgaacaaagttggtcaaatctttcttttgcttatcattaatgtgctttggaataacaatattaactgtagtaatttgatcaccattgccattaccacgaagatatggcacaccctgtccacgcaaagtaaacttcttattaggttgcgtaccagctggaatagttagctttacatcaccatgcacagtcttaacgttaatttcatctcctaaagtagcctgagcaaatgagattggtacttctgtataaatagtctggccacgacgctcaaaatctttagatggtttaattcgatagttaatatataaatcaccatatggtccgccatttatacctgcttcgccttggccttgatatctaagttgttgaccattgtcgattcccgctggaatatccacttcaatagtattcttacggtcaactgttcctttaccgccacaggttttacatggatactcaataatcacaccacgaccatgacatttgtcacaagtggtttgacgacggatcatgcccaacattgattgttgagtaattgtcatataaccagttccatgacatttatcacaggtaattggatgtgtacctttttcacaaccattaccgccacaagtttcacaagtttcgcttcgagtatagctgacctgggtctttttgcccttaatggcatccataaaatcaattgtcaattgataatccaaatcttggccacgttgtggtgcagttggatcaaccctctgttgacggccttgaccaaaaatatcgccaaagatatcgccaaaatcaccaaagccagaagtatcaaatccggcaccgccaaagccttgaccagctccaccaccaaagccaccttgaccatttacaccagcagaaccaaattgatcatattgcgcacgtttttgcttatcatgcaaaacctcataggcttcgttaacctgcttatacttttcttcagctccaggttcatggtttaaatctgggtgatattttttggctaatttacgatatgccctacttatttcctgatcactggcgtcacgatctacgccaagtactttatagtaatcttcttgtgccatctatttgaactccttgtattctcaaaagaaaagaactactcaatgggtagttcttttctccttttgtttaattataaacccattacttatttggatctactttgtggaattcaccatcttgggcattaccgttgttgccattatttgaattaccaccttgtgggccttgaggacctgcttgtggaccagcttgaccagcagcaccaccattttgttgatacaacttaacagctaagtcttgagcagccttggataaagcatctttcttttctttcatttcatccaagttgttgtccttttgggctttcttcaaagcttcaagagcatcttcaactggcttacgatcgctatcagagagcttatccttagtatctttcaaagtcttatctgtagtaaagattaattgatctacttcgtttctaaggtctgcttcttccttacgcttcttatcttcatcagcgtgttcttcagcatccttttgcatacgtttaatttcttcatctgataaaccggatgaactcttaatagtaatcttttgttccttgccagtacccatatccttagcagatacatttacaataccgttcttatcgatatcgaaggtaacttgaatttgaggaacaccacgtggtgctggtggaatatcagttaactcaaagcggccaagagtcttgtcgtctgcagccattggacgttcaccttgcaatacgtgaacatctacagctggttgattatctgctgcagttgagaagatttgactctttgaagttggaatagtagtgtttctgtcgattaacttagtgaagacaccacccatggtctcaataccaagtgacaatggggtaacatcaagtaaaacaatatccttaacatcacctgagataacaccaccttgaattgctgcacccatagctacagcttcatcagggttaattgaatggtcaggttccttaccagcccattccttaactgccttttgaacagctggaatacgagtagaaccaccatttaaaataaccttgtcaatgtcattaacagtaagacctgcatccttcaatgcattgtcaaatggtaccttagtcttttctaccaagtcagcagttaattcatcaaacttagcacgagttaaatctgcttcaaggtgtaatggaccagcttcgctagcagaaatgaatggaagtgagatgtgagtacttgatacacctgacaagtccttctttgctttttctgcagcatcctttaagcgttgcattgccatcttgtccttcgacaaatcaacaccattttcatccttaaagttcttaattaaccaatccatgatacggtgatcaaagtcatcaccaccaagatgagtatcaccattagttgacaatacttggaagacaccatcacctaattgcaatacagaaacatcaaaagtaccaccaccaaggtcgtatactaagactttttcatcttggtctttatttaaaccgaaggctaatgctgaagcagttggttcgttaataattctttgcacattcaaaccagcaatcttaccagcgtccttagtagcttggcgttgagcatcattgaagtaagcaggaacagtaataacagcatccttaacttcttcacccaagtaatcttctgagaatttcttaatatattgtaaaataaatgctgaaatttcttgtggtgtatattccttatcaccaactttaaccttataatcagcttcacccatgtgacgcttaattgaaacaatggtattagggttggtaatagcttgacgctttgctacctcaccgacttgaacttcaccatctttaaatgcaactactgaaggagtagtccggttaccttctggattagtgataatctttggttctttaccttcaagaactgcaactgctgagttagtagtcccaagatcaatcccaataacttttgacatatattagcttcctctcttattgagcaactacaaccattgctggtcttagtgttctatccttatattgatatcctttttgtaaaacctgaacaacgtgatctttttgatcatcattctcagctgctactgtttgaacagcttgatgtaatgtcggatcaaatttaacgccatcagcctcaatctcaactacaccgtgatctttcattgccttcacaagtgcatccaaggtcatttgcacgcccttctttaactgcttagacacatcatcatcggcctcaacgcttagggctctttccaaattgtccattgctggcaaaatgtccttcgctaagctttgagattcgtacttaattaattgagcacgttctttagtgtagcgattttgcatattttgaatttctgcttcactacgcaaatacttatcttcaagatccttgttcttatcttttaaatcagctaattctttagctaatttttgatcttgtttatttttttcttgcttcttttcttcacctttatcggcttcttttttagccttaggctcagaagtcttttctttttgctctagatttttttcacttggaaattcttctttactcacggctaacctcctttattgaaacttgccataataatcaagcaactttttagctagttcatttctaaaatattcaagcaacccaatcatttgtgaatatggcatattcgttggcccaagtaaagcaatagttcctttaccatgggagccaacgctgtactcagctgtcagcaaactataattttttaataaatcattgggtaattcagatcccaacttaacctttactgaataatttccagactttggatccacctttgcatccattaaattagtgaacagattattatgatcaatcaactcgtacaaagaacgaatgtcatttacatcatgttcagaagtattattgagcaaattaatctgtccatccacatacatctgctcactagctgcatcttttacgacatcttcaactaaactaagcaattcagtcacatgttcgccgcctaattcgtttttagctaattcacttagcaacgaaacgttgatttcatttaggctctttccgactaactgatcattaatcatgcggacagccttttcaatttcttcgccgtgaatattatgtggcaaagcatatacctgattttgaatgttaccatcacttgtaaccaaaattgccataatctgtcgttgagacagcggtacaattctaaatcctgtgactctaacatcatgactctcaggtccttccgcaaatgcggtatagttagttaaatctgacagaattcgtgcagcttcttgtacaatttcatttacttgatgaaaaggtcgatctaattggcttcctattgtattataaacagactctggtaattgcaacggctcaactaaattatcaagataataacgatagccctcgcttgaaggaattcgaccacttgaagagtgagttttttcaattaacccctgctcttccaacacggccatttcatttctaatcgttgcacttgaaactttaattggcaactgcttcattacggtctttgagcctactggctcatgactttgtgtaaagtctgtaattattgtttttaaaataagctcttgacgctcggtcaacatattatatcgccctcacttttagcactcacatctctcaggtgctaacagttaatatgataccagaaattagcactaaatcaagtagattgctaattttattcaaaaaatacgcacttttttcaaagtacgtagcttcttaacccttttgcttaaaataagccctaatttcttgctcatctcgttcaagttgctctttcagttcaggtaatccggcaaattttttctcacctctggtatatttataccatttgatcttcattggcttaccatagacatcttcattaaaatcaaaaatattagattcaatatatatcttcttgtcctgattaatggttacattatagccaacgctagtcatggagttataccacttaccatttactttagtcttggtagcataaactccaattttaggaatcaccttatgttctgcccaaatcaaattagctgttggatagcctagcttatgaccatttcgtttaccatgcccaatgataccactcattacataatggtgccccattaattcagtggctaatttcatctgaccatccttaattgcttgacgaatttcagttgagccaatttttctaccgttaaaagtttgctttggcatcactacaatattaaaacgccctttggaaaattggggtaaattagccatatttgcaatattcttagaaccataagtgtaatcaaagccagcaacaacggtatcagcatttaatctgacaattacattatcgacaaattcttgtgcagaaatttgactgaaatttttagtaaatggtaaaacagccaaataatctactcctaattccgccattttgttagctttttcttccaaagtttctaagtatttaaaatctcgtttcgactcataaacttccttaggatgtcgatcaaaggtcaacacaactaatgacaatttcttctgtaatgcaatttctttagcctgattaattaagcgctgatgtcccaaatgaaccccatcaaaaaagccaagggcaagcacaattctagtagataaaatattttccttaacaggatatgttaaatgaacgattttcacagctaattccttcatttcatttattcattttgcaacagcattaagcttgggcgataaagctttccttttttttcataaattgctttcacctttttattgtatcgtagtgcaacttttttcgcattagtttcaagcgaaatacccgctccatttttaactttaagccacttttcttcagttaaatcaacctgagtgtattccttaaaaaatgcatcaatcggctgtataagttcagtggcctttttcggattctcttcaatctcctttaattttactgcttgtgtaatatcaaagccagaactagctgttcttctcaaataagtcatcgttgcggggcaatctaatttttcacctagatcattaactaacgatctaacataagtgcctttgctgcatttaatcttaaaatcaaagctttcttgcccagtatttatatcaaaaactggttctttagttagatcatattgtttgacttcaacctttctctgaggtcgctcgacttcaatctcttcacgcgcatattcataaagatgtttaccattcactttaacagcagaataaattggaggcacttgaacaatttctcctacaaatttattcatattttcttgaatttctgcaccagaaaaaggctgaatcaactttttttcttttaaaacagttccagttgcatcataactatctgtgctataaccaaatagtcccgtgccaatatattcttttggcctagtatgcatcatttcaattaatttagtagcctgaccaatagcaattggtaaaacgcctgtcacctcaggatcaagcgtaccagcatgtcctatttttctaatatgtaatacgcggcgcaaatgataaactacatctgcactagtcatccctttatctttatcaataactaaaattccgtttaacataattattccctattcttttcaacaaaaaaagggcaccatcacggcgccctcttttttatttgctttcccgcttagcatcttgtttcttaacttctgcaatcaaacggtcaatcttactaccatacaaaactgaattatcacgtttaaaaattaattcaggaaccttataaacagttaatgtttgaccaagcaaatgacgcatcatgccttttgccttttcaaaacctgcctgaacctcttcttccttatgctcatcttcagttagcaggctgtaataaacagttgcatatgaaagatcattcgtacattcaactgcggtaatagttacaccacttaagcgcggatcacgaatattcttttgtaaaatcttggttaattcgcgtagaatttcaccttcaacacgaccaattctatgcttcatgttttcctcctaatagtaattacttaggctcaacttgttgcatttcgtaaacttcgaattcgtcgccaactttaatgtcgttgtagtccttaatcgttaaaccacaatcgttaccttgcttaacttccttaacatcatctttaaatctcttaagtgaagcaatttcaccatcatacttaacgataccatcacgaataactctaatcttagaatcattcttaaccaagcccttatcaacgaaggaaccagcaattgtaccaaccttagaaaccttccaagtttcacgaacagtaagattaccgataaccttttcttcataagttggttcaagcatacccttcatggcagcagtaacatcatcaatagccttgtaaataatgctgtaaagacgaatatctacgccatcggtttcagcttggctcttagcagtagcagttggacgaacgttgaacccaataataaatgcatttgatgcaccagccaaagttacatctgattcattaatggcacctacacctgagtgaatgatatttacacgtacgccttcaacttcaatcttttcaagcgattgttgtaaagcttctacagaaccttgaacatcagccttcaagacaatgtcaacttccttcatgttttccttcttcatagtatcgaagaggttatcaagagttacgtgttgaacattttcacgagacttttgtaaagcttgttgtgctctagcttcaccaacacttctagcggtcttttcatccttaaattcaactaacttatcagcagattcaggcacatcgttcaaaccagtaatttcaacaggttctgatggtgtagccttcttaacttgacgtccacgatcattagtcatagtacgaacacgaccaaaagtgttaccaacaacaatcgggtcaccaacattaagtgtaccttgttggattaaaacgtctgctacaggtccacgaccacgtgacaaacgagcttcaatcacagtaccaattgccatttcagttggattagccttaagttccatcacatcagattgcaacaagatcatttgtaataagtcatcaacattttgacctgtcttagctgaaatattaacgaagatagtatcaccaccgtaatcttcaggaatcaaattgtatttcattaattcctcagttacgtgttgtggatttgcacctggcttatccatcttgttaattgctacaattattggaacattagcactctttgcatggtcaattgcttctacagtttgtggcattacaccatcatctgcagcaacaaccagtacaacaatatcagtaatttcagcaccacgtgcacgcatgttagaaaatgctgcgtgtcctggtgtatccaagaatgtaattaagcgatcatctaatctaacttggtaagcaccaatcttttgagtaataccaccagcttcatgagctgaaacatgagtatgacgaagacgatcaagtaaagtggtcttaccatggtcaacgtgtcccatgattgtaacaactggtgggcgtttaacctggtttttagattcctttgactcttccattctcttgtcatagatattatcaatatcagagatgtcttcatgaactttttgctcagcattgataccatattcagcagctaaaagttcaattgtatctttatccaaagattggttttggttagtcatcacgccaagcatgaagagtttcttaacaatttcagctggttcacggtgaattaacttaccaatatcttgagcgttcataccttcttcgtaaactaatgtttctggtaatggacgttccttacgcttagtaagtgttttctttggcttttgctcttgttgacgttttttattcttacgccgctttctctctgaacgatctgaatggtcactacgaccattgccaaattgatttttacccttgcgtcctggctttcccatgttgcgaccacgattattgccgcgtttttcttccttaggagcctcaggaatagtaacttgaactagttctttagtcgcttcaggctgttgcttcttcaaacgagctggagaaggctttaaaatcttaggaccaataactttcttttctactggttctgctttcttcttgttatctttgtggttgcttgttttcttattatctttcactggctgttcttgttttggatgtcttaattgctcatgatattcttttctggctttttgggcttcacgattaagttgcccttcttctgcccgttgcttttgtttaaattgttgtaacaaagcagctgcctttggcttacctgtattatttctacgatcatttttattctcatgaccgtgattatttgaacgacgtttattattgcgtctcttagaattcttagaactattattatcttcttgcttcttttcatttttgcgaatagaagaaacagagatttttattttattctttttattagaagattttgcagcaggagcggagttttggaaactattctttaactttgcaacctgtgaatcatctactgatgacatgtgattctttacatctaagcctaaatcctttgctttttggactacaactttgttatcaacgccgacttcttttgcgatttcataaattcttttctttgccatccaatcacactccttcatttatttttttaactaacgccttagcaaaaccagcatcagttaatcctaaaactttgcgttttttgccaattgcctttgacaattcaatggcagtaaacatagttatcataggaatattgtcttttctggcagcgcggtttactttttctgccgtgttgtcttgaacatcactagccataataaccgctttgattttgtgcttattaagttcattaatgactgtctctgtaccggtagttaacttaccagcacgctcagctaaacctaacaaattaattgctttttgtctattttgcaatcttatttatcaccaaataattcttttcttgccttttgatgatcaacataagagtaaagctcatcgtaaaaagtatctggaactttcgcacctaaactacgttctaatacattcttctctttagcagcttcaatcttacttggatcaagggaaacatatgcgccgcgaccagcctttttacctgttggatcaactgacacatttttttctttatcgataacaatacgtactaattccttcttgggctgcattgtatcggttaataaatccttccgcattgggatttttctttttttcaaaaaatcacctattcttcagttttatcttctttacttgaatcttctacagtagttgtatcatctgagctttcaacgtcagcagcgtcatctgtactttcaacattttcagaagtttcgctactatctgcagcatcagctgtatcatttgttttttcatctacaaattctacttcagattcaggacgaatatcaatcttatagcttgtcaaacgagcagctaagcgaacgttctgacctttcttaccaattgcaagtgataactggtaatctggtacgataactaaagcacttttttcttcttcatcatcaccaaattgaaccgcaatcacttctgctggatttaatgcattagcaataaagtcagatggatcttcttcatacttaacgatatcaatattttcaccgccaagttcgttaactacattttgtacacgagcacccttttggcctacacaggtacctaccggatcgatgttaggatcatttgacttaacagccatcttagttctgtcacctgcttcacgtgcgattgaaacaatttcaacggttccatcataaatttctggaacttcttgttcaaacaatcgtttaaccatgtcaggagcagttcttgagactgtaatttgtgcacccttgctatcggagccaacatgagttactagtacacgaatctggtcttggggattgtaaacctcatttggcatttgatcacggtgaggcataacagcttcaacattaccaatctttacataaacgaaacgattgtcgcgtctttccacggtaccagtaaccaattcatcttcatattgtgaatattcatcaataatatgttttctttcggcttcacgtagacgttgcatgataacttgcttagcagtttgggcggcaattctaccaaaatttttaggtgttacttcaaaacgaatttcgtcgcctacttcataagcacgattaattgttaaagcatcctttaaactaacttcaagacggtcatcttgcacttcgtcaacaacagttttaactgccattaccttgaagttaccttttctttcatcaaaatcaacttcaacgttttgtgcttgattataattctttttgtatgcagctaccaaagcggctttaattgcatcaacaataatatcttgcttaatgcccttggtattttccaaagtagcaaacgcttctagcatttctttagacataagtttttgatcaacctttctaaaattcaattgcaaaacgaatatttgcaattaacttacggggaacagttaatgtttttcgtcttgtcttatcttttatttctaatacaacttcgtcatcattataagacttgagtgtaccttcatacatttttttattctcaatcttttgataaagaccgacatgaatgtaatcattcagagctttttcccaatcagcttttgttttgattggtcgttctgcccctggagatgataattccaaaacatagggatctggaagtggatcgggatcaagagcatccagcttttcggaaacaagttcacttaaagctgcaatctcatcaatgtcaataccgtttggttggcgatcaacataaatgcgtaaataattttgccctttttctttaacgtattccatatcaaccaacatgtcaccatgttcatcaataattgtttcgacaactggacgaacagaatctataactttagacaaaaattttcctccgtaataaaaagagtgagcatcactgctcactcgaatttacctattcgaacttcatacgtagtataccatgttttacctgatcttgtaaaatttaactatcagaaaagtgataattgattttcatctggcatcccttccaagacaccattttcttcgaaataattcataattgtttgtgatactttaccgcgcttagctaaatcttctttagacaaaaacttcttttctgcacgagcagctacaatctgcttagctgcattatcccccaaaccaggaacagcattgaacggtgctaaaattgtatgcttatctaagatcttaaagtcagttgcttcagattgatcaatatcaaccattttgatcttaatccctcgttctagacattcattagctatttctagcacggtcatcaaactcttatccttagctgatgcatcgtttcctttatcctgaatttccttcattgcagccttaacagtattcttaccatgactcattgcaaccaaatcaaatagatcggcacgaactgaaaagtaagctgtgtaatagatttcaggataatatactttaaaccaagcaattcgtagagccattaaaatgtaagccgtagcgtgagccttagggaacatgtacttgatcttcagacaagaaggaatataccaatctggaatattcttatttttctttaaaatagccatattttcatcgctgatgccacgaccatgacgaacggattccattgttgaaaaggcaacttctggcttaacgccccagtgaattaagtccatcatgatgttgtcacgacaaccaattacatttttcagtttgcaaattccttgattgattaagtcctcagcatttcctagccatacatcagtcccatgggacaaacctgaaatctgtaataattcagaaaatgtcgttggcttagtctcctcaagcattcctctaacaaaacgggtaccaaattctggaacacccaaagttccagtttctgattgaatctgctctggagtaacacctaaaatatcaggactagaaaataatgacatgactccagggtcatcgggtggaatagtcaatggatcaatcccagacaaatcctgcaagtgacgaatcatagttggatcatcatgtcccagaatatcaaacttcaaaatattatcatgaatagagtggaagtcatagtgagtaatcaaccaagcggcatttacatcatcggctggatacgataccggcgtaaaatcgtaaatgtccatatcatcgggcactacaacaattcctgcagggtgttgaccagtagttcttttgacaccacggacaccagctgccaaacggtctaattccgcatttcttagctttaaatcatgctcttcatcgtagtgtttagcataaccgtaagcagtcttatccgcaacagtcgcaatcgttccagcacgatatgaattatctggtccaaacattactcgaataaaattatgggctactggttgatagtcacctgagaagttcaaatcgatatcaggaaccttatcgccgtgaaatcctaagaaagtcgcaaatgggatatcttgtccatctttaactaatggagttccacattttggacaatctttatcaggcaagtcaaaaccagaaccatattccccattttcaaagaattgtgaatacttacagttaggacaacgatagtgtggagctaacggattaacttcagtaattcctgacatcgttgctactagactagagccaacagaaccacgagaacctaccaaatagccatctttatttgacttagctactaaacgctgagaaatcaagtaaataaccgcataaccattcgaaataatggaatttaattccaaatctattcgatccttaacaatcttcggtaatggcttaccatataattcataagccttatcataggtcaacttcttcatttcttcatcggcatgttcaatatgtggtgggtataacccatctttaattggctgaatttctgacaattcatcagcaattttattggtattgtcaataacaattttcttagccacatcttcgcctaagaatgaaaatgcatctagcatttcctgtgttgaatagaaatgcaaatctggctgtggcttatttcgactagggtttgatctctgagccgcaatcaagattttacgataaatagcgtccttttggtcaacgtagtgggcatcgctagttgcaactacaggcttatttaattccttccctaatttaataatattttcaataatttcatgtaattgatcttcatccttaatcaaaccatcagcaattaattgcgaataggttgctggaggttgaacttcaagataatcataaaatttagctttttctcttgcttcgtcgtaacctttttgcatcattgcgataaagacatcgccttgccaacaaccagaaccataaagtaaaccatcatgcaaacgagccaaatctgacttcggcgtacgaggaatacggaaaaagtccttcgtgctggcaattgatactaatttgtaaagattctttaatccagcttgatcctttgccaaaactgtcatatgggaaggacgggctcgtttataaacttcaccatgtgctgcatagccattcaaattattcaaattattttcatgatactttttattaaaagcatctaacaatttaaacattaaatagccagttgcttcagcatcctgatttgcccggtgatggtgttccaaggaaacattatacttcttagctaatgaatctaaagtatggcgactctgctctggatgtagtaaacgcgatacttcaagtgtatcaactactgtctgagtaatttcttttagccctgcacgtcttaatgctgcattaacaaacccaacatcaaattgaacgttatgtccacacagtggtcgatcgccataaaagtcttggaattgcttaatgacaactgcttcatcatcggctgcgccaaccatttcatctgtaattgaagtcaaattaatagtttgctcacttaaaggatggtgcggattaatgaacttatcaaagcgttcaagcacttctccgttcttcatcttaaccgcaccaatctcgataattgtgtcgtaaacagatgacaaccccgtagtttcaacgtcaaaaattacaaactcgcggtcttcataggtcatcggtgcaggattcaaaactagtaaagcatgatcatcaatcatattagcttctacaccatacaatattttcatgtccagtgctttaccactgctatatgcttcagggaatgattgaacatcaccatgatcggtaatcgcaattgccttttgtccaaacttcttagcagttttaataaagtccgtcggagtattagttgcgtcaacctgactcatattagtatgaacatgtagttcaactcgtttaggctcaccttcgtatttttcagttcgcccaacatgctcgacagtctctaagctactaatattaaaaactacatcatgtatatattgatcatcagcaactgacccctgcattttagcccaagttcctggtttaattgcagatagctcttcaatttcatctttattagaaacaaatttcttaaatgcaattgaatcactataatccgtaatttcgccagaaaaaatgattgcaccagatttaagctcacgagtttcaacattaaaaatatttccctcaattactacattacgtacgccatcttccagctctttaatttgtgtaattggagcattttcatctaatttacgtttaccataattagtacgtctagttggatactgtttaggttgttgcggtttaggtttgtctggcgtcttctcaaagacttcctgcatgcttttttcatgctcttgttgcaactcctgcaaactttctaaattgtttttagaacttgtctgatccagctgagttataaatttcaaattaaagaagccataatcacgcatcttttcagctaaatcatctaaagccttctgctcaattaaaccatcaatcacattattatcaactggaataacccagcggccatcaacttttttaggtttttggccagccaaaaattcacgagccacaggttgcaaaatatttgaattttgaactacataatgccaataatctggtaaatattgatcagaaccatcagctgttccaacataaaatcttacatttacaaaagaagaaaaagtttcttctacagcttttcttaatgctacataggtgtcatacatcaagggagtatcaaaaaaaacgtggatatcccacctgtgttctttagcgtaaacatccacgttttcaattttccctttttgtagaagcgcattgtcttcaaaactatcaggaaattgaacctgtttgagcaattttaagaaaagatcgtttttatttgccacaaaaattatcctaactcttgatttacaaacttatctaattcatcaattgacatttcggttgctttgtcatcagttggtcgcttaacttcaacaatgccatcagcagccttcttaccaatcgtaattctaattggtgcaccgactaaatctgcatcagcaaacttaacaccagcacgctctttacgatcatcgtataaaacatcatacttttcactgaatttcttttcaagtttttcagctaattcagtttgatcttctttattcatcttcatttgaacaatatgtattgcaaatggagcgatttcctttggccatgcaacaccacgttcagttaagtgttgttcaacagctgctgataacattctagtaacgccaataccgtatgaacccatgatgacaggctttgctttaccattttgatctaagaaatctgcacccatggtcttagtgtaataagtacccaacttgaaaatgtgaccaacttcaattgaagtagtgaacttaagcggtaaatgatcaacaggatctggttcaccttcgttagcagtccgaatatcagcaaattcatccaccttgaaatcacggtctaagttagcattttcaaattgataatcggtttcacctgcaccaactacaacgttgtaaagattcttaacagtttcatctgcaataatcttatcagcccaatctgcattaacaggaccaacgccacccttttcactaccagtgatttcctttaaatcagcagtatttgcttcatgaacctcatcagcgtcaaggatatgacccaacttaacctcattaatttgcttgtcaccacggattaatactaaaactttttggtcatcagcaatgtataaaatacttttaacaattctagtagctggtacatcgaggaatttagctaatttttcaattgtatcgcagcctggcgtagctaccttagttaattgcttagcatcttctggttcttgcttgaaagtatcaatactcttagccatttcaaggttggcagcatatgttcctttttcattagtagcaattgtatcctcaccgatagcagcaggggcttgaaattcagtagagtttttacctcccattgtacctgagtcagcaattacagggtgaacagtaacaccggcacgtttaaagatacgcttatatgcatttttttgatcatcaaattgttcatccaattgatcacgagttgcagcaaaactgtaaccatcaagcattacaaattcacgcccacgaagaaggccaaaacgaggtctattctcatcacgaaacttagtctgaatttgatacaaagcaagtggcatttgtttgtaactctttaagttcttagcaataatttcggtaaaagtttcttcatgtgtaggtccaagcaagctttcacgtccatgacgatcttttaacttgaacatttctgcaccatatttcttgtaacggccactttcttgccacaaagttgcaggaagtaaatgaggcataatcatttctggaacattaattttatccatttcttgttcaatgattccctcagccttgcgtaaaacacggtagcctaatggaagataagcataaactccagctgtgacttgacgaatatacccacctctaatcatcagcttatgactttcagccactgcatctgatggtgcttccttcaaagttggcataaaaaattttgattgacgcattcttatctcctaaagtaaaaaatataattatttaataaaatagcgatagatatcgttacctgtaactgcaataattaaaactaataataagccgaaaccaattaattcaacaattgcctcatgttcttcagaaatcggtttaccgcgaactaattcaattaagttcaataaaagtttaccaccatcaagcccaggaattggaattaaattgacaattcccaaattaatcgaaatcattcctaaaaaggctaatacataagtaaagcccatttgtgaaacttgtgaagtttgagaataaattccaactggacctgataatttattcaaactaaagtggctaaataagttacctacggctctgaaaatcagaccggtagttgaaatagctgtatcccagccacgttttaatttaacaactgcattctcattgctcttagctacaataccaatttgataaactgtttgtttttgaattttatgagcttttggcttaactgtaactttcctaatttgaccatttttctttaattcaaagtgtaagaccttgcctttactttgattaatctgctgtgacacttgatcaaaattattaatcttttgtccattaattgccacaatctgatcaccagtcacaatttttgcatcacgcgctggtgaattagcctgagttgatccaactgtagttgttgctggacctggaactgtaaatgtccagattaaaaatactacaaacccaagaagaatgttcataaaaggtccagcaaaattagttgccaacttttgccaaacattagcttgattaaattgtgtatctcgaggcgcaataattaattcagttccgtttttttcaataatagttgcatcatgagctacgtgataagttactggatcattttcatcgccattttcgtaacccttaattattaaatcgtctactagatcagcctttgttacttgaacgggaattccttcaattggtatttcgctttctgaagcatcaattctcactacttcattttgttcattcaattgtaaaacaaccgtcataccaggatccagcttgctttcatcgtcagcgcctgctaaacgaacatacccaccaagtggtaaccaacgaatggtataagtggtggggttacgtctaatttgaaaaagctttggacccattccaattgagaattctctaaccaaaatacctgactttttggctacgataaaatgcccaaattcatggacaaataccaatataccaaagacgacgataaagattagtatacccttcaataaaaaattctcctaatgaacaatacctaaaattgtagccactactggcaatacaaacagcatactatcaaagcgatccaggataccaccatgacccggcaaaatctttccggaatctttcacaccatagaaacgcttgtaagctgattcaactaaatcacccatttgaccaacaattgataagaaaaaggccagaataatcatcgttaattcagatacaccaaagttaatacccaagctgccaagaattgccatatagatggcactacaaattaaggcacaaacaactgcaccgatcgagccctcccatgttttattaggactaataactggccataatttatgttttccaatcttacgtccaatcatgtaggcaccgatatcagtggaccaaacaacaacaaaaacacaacccagcaatgctaaaccgttttgtgggtatgctctaatggctgccatatagtgaaaacctattccaatgtaaagtgcagccaaaatatatacacctacatcatcaaaagtggttttattctttgaaagaacagtccaggtcaagaacaacataataattccataaaacacacctaatttagtgatatttgaaggaaatactttaaagaatgagtctggaactgtccaggttaaagttgcaagtaaggctaacaaaaaattaaaagaaactaagatttgtttcttcattaaaaagatttcgctaatgccaactgctgcgaataatacagtcagccaatccatccaaaggccacctgcgagcacaattggaataaaaagacataaggcaataattgccgtaattgtacgttgtttcatatttaactatccgattcgtctactttaccaaagcgccggttacggtgcttataatcttctacaaatttttttaaatcattttcatcaaaatctggccaatttttttcgctaaaggcaagttctgaatatgctaattgccataataagaaattagaaattcgctgttcaccggacgttctaattaataaatccggatcttgatatggaccaaagtttttagtcatcaaatggtctgaaatcattttttcagtaatttcttcgctttttagtgaaccagcttcaatcattccaccgagctcctgcatagcagacgtaatttctcttcttgacccgtagttaaaagcaaaattcagaattaagcctgtattattggccgtctctgacattgcacgttgaacaatgcgataagtcttttcaggcaattcatccaaatagcccatgatatttaccttaacattattttccatcaatgttggcatgtatttatcaaaaaagcgaacagggaggttcattaagtaagctacttcttctttaggacgagcccaattctcagtagaaaaagcataaagtgtcaaaactttaattcctaatttatcagcagctaaagtaatccgctcaacattatccattccctctcgatggccaacaaaacgaggtctatgcctcttttttgcccaacgtccattaccatccataataatggctaaatgatttaattcattatccttattactcatctttaaccttgagtaatttccttacgcttttcatcagcaagttggtcaatctgcttagcagcatcatcagttactttttgtacttgcttttctaagttacgttgttcgtcttcagtaatatcaccattcttttcatcttttttcaaagtattcatggcatcacggcgaacatttctcacagcaattttagcttcttccgcaaattttccaacttctttggcaatttcttctcttctttcaccagtgagttgagggattactaatctaattaccttaccatcatttgccggagttaatcctaagtttgaagccaacaatgcatgttcaatatcatctaatgaattttgatcatatggagtaataagcaatacacgtggttcaggaatggtaatactagacatttgagtcaatggagttggtgccccatagtattctacttggacattatcaagaagagcagcgttagcaacacctgcacggatagaagctaatctcttttgataaaccttaatagaatccgtcattttagtttttgctttttcaatagtttcgttattcattatttatcacctctaataacagtaccaatattttcacccaatacaaccttcttgatattgcctggagtattaacgttaaagacaattaatggaatttcagtatccattgaaagtgaacttgcagttctatccatgaccttcaagtcttttgaaattaaatcaagttgagttaattctgagaacttagttgctgaaggatcagtctttggatcagctgagtaaacaccgtcaacaccgtttttagccatcaaaattacatcagcaccaatttcagctgcacgaagggctgcagtagtatcagttgagaagtatggattaccagtaccaccaccaaaaatgactacacgacccttttcaaggtgacgcaaagctcttcttctaatgtaaggctccgcaatctgtctcatttcaattgaagtttgcattctagtaggaacacctattttttcaagaccatcttgcaaagctaaaccattcatgatagttgctaacatacccatgtaatctgcttgagcacgttccatacccaacttagcgccagtttcaccacgccacatgttaccgccaccacagacgataccaatttcaacacctaaatcatgaactgatttgatttctttagctaagtgaccaattacagtaggattaatccccgtacccttgtcacctgctaaagcttcacctgatatttttaaaatgacacgtttatatttaacttgactcataatgacctcctctaatagctttaattattctaccatatctaatgccgcaatgtcttttaacacttaaaacactacaaaatttttacaaaaaaagaaggagcacacggtgtactcctcctttctatgataattatgtaataatgactacttcatttgttcacgaacttcagcagcgaagtcttcttgcttcttttcgataccttcgccaacttcgtaacgttggaaagcaactaacttagcgcctttttccttcaaaaattcgccaacagtcttgctatcgtccataatgtagtcttgtgataacactgcaaattgcttgtcaacttgagtattatcatcaataaagcgttgcatcttaccaggaataattctgtcccaaatcttttctggcttaccttcttctttaagttcagccttgatgtcttccttagccttagccaaaacatcatcagttaattgcttagctgaaccgtaaacaaggtgaggtaatggtttcttatgtaccaatgcacgactttcattgtcttggtcaatcttgtggttcatcacagctaattgatcagtgataaattgatcatctaattcgtctggtgaaataaccttagggctcatagcagcgatgtgcatagccaagtgcttagcagttgcagcatctgcaccttctaaaacagtgataacaccaatttggccaccattgtgttggtaagcaccaaattcttggtcgtcattcttttcttctaaagcaaaacgacgtaaaacaatcttttcaccaattgtagcagttgcgttaacgaatgattggtctaaagtagtaccatcagccatcttcaattccttagctgcttccatatcagctggcttaccttcagcaatagtcttagtagcttcatttaccaagttaacaaacttgtcgttttgagaaacaaagtcagtttctgagttaacttcagtaatagctgccacattaccattaacgtaaacgccagttaaaccttcagctgcaacacggtcagccttcttagctgccttagccatacctttatcacgaaggtattgaacagccttatccatgtcaccgtcaacttctactaatgccttcttagcgtccataacgccagcaccagtacgttcacgtaattctttaactaattttgcagtaatttgtgccattaatagatcctcctacggaactaatagtaaaatctagtcttctgggttttcttcagcgctaacgatttcttctgaaccgtctgcattttccttgaagtcaacttcaactgattcatcatcttgaccttgttgaccttcaacaacagcatcagccatagcaccagcaatcaaacgaatagcacgaatagcgtcatcgtttgatggaataactacgtcgattgggtctggatcagtgttggtatcaaccatagctacaactgggatacccaaaatgttagcttcgtgaacagcaatcttttctttcttagggtctactacgaacaatacatctggaattcttggcatatcttcaataccaccaaagaatttttcaagcttgtccatttccttagttaagagagcaacttccttctttggaagaacatcaaaagtaccatcttctgacatttgctttaattgctttaatctcttaatacggctttgcatagttgaccagttagtcaaagtaccacccaaccaacgttggtttacgtagtattgacctgcacgagttgcttcttcagcaattgaatcttgagcttgcttcttagtacctacaaataagaaaacgccaccgtcttgggcaacagccttcataaagttgtaagcatcatctaacatcttgatagtcttttgcaaatcaatgatgtagataccatttctttgagtgaaaatgtaaggagccatctttgggttccatcttctagtttggtgaccaaagtggacaccagcttcaagcaattgcttcattgtaacaacgtctgccatatttaaattcctcctatggttttatatcctctcaagcgttcatttcatcatctaaccactaccctgggcaccacgatgatgattgctcttgatgtgttttaagtttcatatgctgacacagcatactcaaatattctacaagaaaagattacagtatgcaaggattaaaactttatattatgctcatgcaaaaatttttccttccaagcacgtgaatgatgtttaaaccaatattctcgtttcaaagctaaacgcttatcgtcaaactgttcatgataaatcatccgtacaggacgccgtgttttagtatacttagctccttttcctaaattgtgcattttcaaacgatgttctaaatcattagtaaaaccaccataaaaactgccatcattacacagtaagacataaaagtaatatttaccctgtgcttcatgtttagctttgtcatctgcagtttctcgtgagattcgctgtactaatggagtgaagtcgccatttgattcatgaacttcaacagcatctttcaaaacagttccatcagttccagtatgcttgacggcttctacaataattaaattagcatcttcaccgcgatgtggcacaaatggctgcaccattttgatgcttaagtcatgcttcatacaataataagcaatctcacctaagcgctctggccgatgtaccattaacattttgcctttcattttaagtaagccactagccacttcaattatttgctctaaattaatcaaaagttcatggcgagcaattgcttttttacgatctggattaacttcatgtcccttaggtgctttaaaatatggtggattaactgttactacatcataactatctttccgcaaaaaatgtcctgcatttagcacattatcctgaaaaactgaaatacgattttccatctcattaagcttgactgaacgaactgcttgagaataaacttcgttttgaatttcaattgcatcataatgggcacgattaaaataagccatatagattgtagctgcacaatttcctgcacataaatcagcaaccttatctttatcacggatcaagtctttagcccaatatgctaaaaataatgtatccattgaaaaactaaaagccgttttatcttgaataatacgaagattatcgctatacatgtagtcaattcgctcattatctttcagatctaccataaaaatatttgcctttctcgtcattatatttttataatagcttacatcaaatgaaggaatcaatgaggagacaatgttttacaaaattatacgtccgattgtccgtttcatcgtttgggtgttaaacggtcatctacacattcatcataaggatcgcttgcctcagggcaattatattttagtagccccccaccgtacatggtgggaaccactgctttttgcactaggtgctagtccaatggaattcatgtttatggctaaaattgaattattcaaaaatccggttttacgatttattcttgatcatgctcacgctttcccagtcgatcgaaataaccctggaccatcagccttaaagattccagttaagggacttagagaaggaaagttatcattaattatctttccttcaggcacgcgacattcagctgaattaaaaggtggagttttattaatttccaaaatgtcaaaaaaaccaatggtacctgttgtctaccaaggccctttaacttttaaaggactgcttaagcgcaagccattagaagttaactttggtgatccaattaccattgatcgtaaaactaaactaacccatgaaaatgaacaaattttatttcaacaacttgaagatgcttggaacaaattagataaggaaatggatccaaatttccactacgttgctaaataagtaaaaatcagtataaaacaaatattgctttatactgatttttctttacctgtgcaatttaatataagtgttaaaataatttttaggttttaaatattggaggaaaaagcaattgttagaaaaaactttttacaaaatgatgcttagtaaatctttccccttttctgttaaggtaacctactgggacggtaagagcgaagtttatggcaatggtgatcctgaaattgaaattgtttttaatgaaaagattccaatgagtgaaatcactcgaaatgcttctctagctttgggcgaaggattcatggataaaaaaatcgaaattcatggtaatatccaaaaattgcttgttggtgcttatgaaagtgctgattcattcatgcgtgcttctaagttccgtaagtttatgcctaagcaaaaacacacggaaaagcaaagcgaagaagatattcaaagccactacgacattggtaatgatttctacaagatgtggcttgacccaacaatgacctattcctgcgcccacttcgaagatggcaataaagatgatcttgaacaagctcaaattgcaaaagtacatcatatcttaaacaaactccacccacaaaaaggcaagaccctacttgatatcggatgtggctggggaactctgatgcttactgcagctaaggaatacggtttaaaagtcaccggtgttaccttaagtgaggagcaatttaaattagttcaaaagcgaatctacgacgataacttacaagatgtcgcaaaagttagattacaagaccaccgtgaacttggtgatcaaaaatgggattacattacttcagtgggaatgtttgaacatgttggtaaagaaaacttacctaaatactttgctgatgtctacaagtaccttaacaaagacggtgttgcattaatccatggtattacccgtcaacaaggtggtgccactaatgcttggttaaacaagtatattttccctggtggctacttaccaggcttaccagaaattgttactgacatcatcgattcaggcctacaaattactgatatggaaactcttcgtcgtcattatcaaagaaccttggaaatttgggataagaactttaatgccgttcgtcctgaagtagaaaagaaatttggtgaaagattctgtagaatgtgggatatgtaccttaatgcttgtgctgctagtttcgagtctggtaacatcgacgttatccaatacctattgacaaagggaccatcaggtaaaactttaccgatgactcgtaaatatatgcttgataaataattacatatcaaaaatagtcactagaaattgaaatccagtgactatttttttattcaattttaccaaatagtaatccgttcttctggatcaagccacatgccatcagttggcttaacgttaaatacatcatagaatgcattttgacattgaaccggaatgtttactctcgttggttgtggcgcatggacatccgtttgaacttcagtcttaattgcctcagggcgttgtttctgcatccagctacgagcataattctcaaacaaatctttcaaatccgccccatcattttccccagtttgaactacacaagcaaggccagctagatcagcaatattttcaccaacaacctgcttaccattaatcttagcaggaccatattgtaagccatcaaaaatatcaaccatttgaccaactcgtttattaaactcagcaaaatctttgtcagtccaccaattgttcatatttccatgttcgtcgaattttgctccactattatcaaatgcatgtgatacttcatgcccaatagttgcaccaattccaccataatttgcaccacgagattgattaatgtcataaaatggtgcctgtaaaattccagctggaaaggttaagtcatttctttgcggatcatagcacgcattattcaaattacctggcattagccaaactgaacggtcaactggcttagttaacttattaagcatatatttcgttcgtacagttgacattgccgcttcattttcatacaagctctttttcggatcaacttgtaataagtcaaagatttcttcgatcttgtctgggtaaccaatttttaaaaccaacgcctttaacttaatcacagctttctttttggtttcagcagaaagccatttattagcattaattctttcttcatataccttaagcatccgttggatcatgtcttcaacatcttttttggcttttgccccaaaatatttttgtccataaaagataccaactacttcatcaaaagcaccattagccaaacgataagcttgcttaatttgtgatggcaattgtggcgtaccagtaactgcttgaccaaaaggaaacgcagcttcacgaaaatcttgtgacaataatttagctacgctgttaatgtatttaactagcatccatcctttaatctcagcaaaattcccttcattcaataattcttcagcatgattgagaaaacgtggttccataacgataattcgatctggcttaaccggtaaaatagaatccatgaaatcagccatgtcaaatgatttaaattttttaataaagtcagcatatgttactggattataaattgcggcataatctgaccattcctcagttgacttaactaccttagctaatttttgatcaaaggccaaagcgctttcaacataaactcgtgcttcgcttttaccaataccggacattgtcagtaagttaatactttggtcttgaagagtatccaaaagttgcttagcatcagcagtttgatacgtcgtagtatctggtaagaatgtgcttgggccaccaaaatggagtacgtttacatcagtgttcttcatatcggcatcgacgtcaaatacaaacggtaaagcatatggtcccataaacaaatcggcagctttttgtttaaaatcattaaaattatttaaggatattaatttttgtaaatccttttgaataggattagctttttctgcatccctcttagcaaaatcttttgcaatcttatacaaaataactgccttatcaaagtctttaatctcaggcatcttttctttgcccgccgcaatgtccgcaaagtctttcattactcgatcttcgattttttggtcaagctctgaattgacaccagcagatgtcttatcagcaggaatttctgctttagatagccattctgagttaacagccaagtataagttatcttgtggcttagcatttaagtctggcttagaaacgtcgccagctccaccacgaactgtaaaatatcttttcatttttgctccttataaatattcataattatttaatactttttaactattatatcaaaaaaagacgttgctactacacaaacgtcctgaaaaacaattagtttttattttcattattttgcaaggtatacaaattatagtaataacccttttgtgcaagcaattgatcatgcgtaccccgttcaattatgcgtcccttgtctaaaacaataatttgatccgcatcggcaatcgtagaaagacggtgagcaatagctaatgtcgttcgaccctttctcagccgctttagtccttgctgaatcaaagtttcagtctcggtatcaacatttgctgttgcctcatctaaaaccaaaatcttaggatctgtgactaaagttcgagcgaaagaaattaactgtctttgtccctgactaaattcttctccgccttcaatcactttagcatgatacttacccggcattctttcaataaagcgatccgcttggactgccttagcggcgtctttaatctgattatcagtaatttgattattatacaaacgaatgttagatgaaatatctccataaaacataaacggttcttgcaataccaagccaagtttttttcttaattcttctttaggatatttacgaatattaacgtcatcaatcaagatttcaccttgaccgaattcgtaaaaacgcatcatcacgttaataatcgagctcttccctgacccagtatgaccaacaattcctaaagtttcacctggattaactacgaaagaaatatcatgtaaaatttcatgcttgccatcataagaaaagcttacatgtttaaactcaatttttcctttagtaatcgtcaatcctttttgagcatcctgctgtggttcatattgggtatcatcaagaatccgaaaaatccgctttcctgcaacaatcccatcttggaaaaaggtcatttgatccatcacagttgaaataggattaaaaagttgcgaaatgtattgtgaaaaggcatagactacaccagctggaacaaaagtttcacgtaatggaaaaccaaagtacattaatgaaatggctaaagctaacgaataaagcagcgatgtcaatggcgataataacaatgaatttactcggatcatgttgaagcgtgtattcattaaaccaccattttcgccttcaaaattattagtcatccgtttttcttgattaaattcttggataaccgatactccttcaattgattcatttaagttagcgttaattcgactaagacgctcacgataattacgataaagacgtgagcttttttgcgaataaagccaaacaactaataataaaatcggaataaagagtaaaatcaaccacccagcaactatattagtagtaaacatcgctactaacgcagtaatcaccgaaaaagcaccaatcacaaaagttgatagcaccgtcaaaaaattactcaaagtcatcgtatcattagtaactctagaaacaattgagcccgcaggagtttgatcaaaatagcgcatccctagcttatgcagtttgcggtacaatgcccttctgacactctctagcgttttttctgatcctaaagcaaagaaatattggtaagtaaactgaattattgcctttaaaattgagcctaaagcataaagaaaacctgcaaacaaaatcacctgcactgttgtgctttgatgcaatagaaagtgatctaagaaatattgcaagccacgtggcaaaagaatattaattacactaacaataaatgcaccaactaaagcaacaatcatttcaaatttaaattgcttaacaaagcccattaaacgcttaaaaatatcaacttgctctttaaatggtatcgccttagaccaaacagattcatgctgttcttcgttattattcatctgtatcttcacctactttcgcttgtaattcctgtctacgccacatttccgcataccatccatctgcagctaatagttgttgatgattaccacgttcaacgatttgaccatcctttagaaccaaaatcaaatcagcatccatcacggaagtcaaacggtgagccgcgatcattgtagttttatcagctctctcttttcttaatgatgacaaaatctcagtttcggtctttgcgtcaactgctgacaatgcatcatctaaaatcaaaatctgactatcttttagcaatgcccgagcaattgacattctctgtctttgaccaccagaaagagataagccattttcgccaactaaagtttcatagcctttaggcatttgcaaaacatcatcatgcaaatcactcttcttggctgcagctgcaatatcatccttatctacattttcagaagagaaagcaatatttttgccgatactagttgaaaacaagaaattattttgaggaacgtaggagatctgactgagtaatacctttagttgaatatttctaatatcttttccattcagagtaatttgaccatcatactgatcaaattctcgcaaaagcagttgaataattgtggttttacccgcaccaactcgaccaactaaccctaaagtttgcccaggttttaaagtgaaattgacttgctttaaaactggaatatctggctcatctggatatgcaaatgatttaatgtcatattttaattcaccttgcaaatcttgagaagtaatatttggatctgcatgtgcatcagtaatcaaaggcctttcatcaagtaacttttctacacggtcataacttgcactaccacgctctagaatattaaacaaataaccaatagcaaacattggccaaaccatgttagaaatatacgcgataaaagaaaccaactggccaattgataaaatcttgttagttactaatagtcccccataaataatcgtgatcacatacgtagtaccgataattattgttcccagtggatcaaataaggaatcccagacaaaaacttttttattaatattgatcgtttcatcgaccatcttgtcaaaagcagcagtatcttctttcccttgaccaaaagttttgagcaccttaatcccagatacagattcctgagttttattattcagcttagagaatgcagcctgtgacttatcaaaagcatcatgtaagtgatcacctaatttccaagctcccaatgccaaaaacggtaatggtaataaagctacaatagttaaacgccaatcaacaaaaatgatcatggcaatcattgttgaaagtcccataactaaagaatcaaccaatgttaaaacgccatcaccagcaacgttctgaatggcagaaacgtcattagtagcatgagccattaaatctccggttcgatgacgctgataaaaagtccgatccatcaccataaaatgatcaaataactttgaacgcatttggcgctctaattctgctgcgccgccccaaatttgtttacgccaaaaatagcgcaaaatataaagtgtgaatgcagcggccacgacagcaatgatcaacattccatattgtccccaagagatgtgaccttgatccaattgatcggccattaagcctaatacacggggcggtaccaagttagctaaagaagttaacgccaaaaaggtaatgcctatgatataacgttttttctcagccttaaaaaaccaccctaacttactaaatattcccatatttcacctcattcttaaaagtgcacaaaaaagacgaaggaaatccttcgccttttctaacaaaactaattaaattaattacttttgttggtgcttcatcatgttcattacttgatgtaccttcttatttgaaggcttttgacccatttgggacatcatagcaacgatcatatcttcactaataggaggattttccttaaagtacttcttcatgtaagctcttgcaccgtaaaaacctgctacagcgccaatcaagagcgcaatgataattaaaaaaattgctaaacctaaattcatattaaatcctccatctaactaacatttatatcttatcatagttctctaactttttgaaagaactaattaatcttttctaagtccttttcttctttgtgctcgcttggcacgttctgaggtaacttccttgccattcttgtctaagatgaccatgttttcaacatcttgcttaaaggcagctctaaagttagctaaaaatttcttatgtagttcttttctttcagcttcttcctctggagttaagccttccttttctttcttatggtaaagttcgttgattcgatcagttacctttttttcttcttctttgctcattgcatctttattatccataataattccacctcacattaacactcattagtctaccctattttatgtcataaaaaaagtataacttcttaagaacgcctgtttgataatattgacattatctggtagaattaggttataatattaagtaccataaatacaaacggagaattaaaaatgccaagaaaaacaagcgataaaaagcaactagaaattttgcaatatatttacgatacagttgagaaacggagcattccacctacagttagagaaatctgttctgcagttggtctttcttctacttccactgtccatggtcatttagctcgccttgaaagaaagggctggctagtaaaagacgctacaaaacctcgtgctttggaaattacccgtgaaggtaaaaaagagttaggtatcaagccaaaggaaattccagttatcggtgtggttactgcaggacaaccaattctggcagttgaagatattgatgactactttccactcccaccagacttaaaaagtgatgctggtgaactctttatgctcaaagtccacggtgaaagtatgattaacgctggcattttaaacggtgatagcgtaatcgtacgcaaacaatcatctgccaacaatggtgaaatcgtggtggcaatgactgaagaaaatgaagctacagttaagcgtttctacaaagaaaaggatcactaccgattacagccagaaaatgatacaatggctccaatcattttacctaaagttacaattttgggtaaggtagttagcttgtatcgtaataacattgactaatttcaattttgacctagataatttatctaggtctttctttatgccaaaatttcagttattttttcttcaaataatggtaaccatttctttagataacccgcacgagttggatgaatttcatcagccatatacaaagcgtcttgatgctgaaaatcaggatgatcgtataaatctagaatctcaacgtgacacttttgagccagttcgtgtactcgttcaaccatctgtttgtataacggattagcaaaataaggattagtataaattaaaattggacatttccaccttgcttgagccgttgaaatcatatattccaaagctcccgtaatggttttggtgtcaaagttttgattagtaattttgcctagttttttattttgatttgcatcattagttgaaagttgtaagacaaaaacatcaggttgtgattcggtcagctcttctctaaaacgagcaacataagaatcgtttggcttataagtatcttcatcaactaaggtcgtaccattttctgcatctttaattgcagcaacgccatcacgcttccaaagataatcaacaaagctttcacccaaagcgccaaaaccaaaagtaacagaagaacccaaaaataaaattttcttacctatcaaaggactcgcaacggtttgtacactatttagactatacttacgactatttcctgctaaataagcaatatcagtgtaataacgttgatgtaaagcatgctcatctagatccatgcgtaattcatttaaagcgatatccgataaatcattattttgtctaattggaatcaaaaaagtttcattactcattttcagatttttccttttctacatacggcttgattttatcccaatctttaataatatcatctgttagcttgcgattataaaaaacagcggcaggatgatattctgggaaaatagtgtatctttcttttgaccaaatatagccgtctttagtttcatttaaacgtaaaattggtgtatttttaattacttgaccatgttcagctgaaatcttatgaccagaccccaaaagacgttctaatcccgtattacccaaggcaacaattagttttggttgagcatagtcaatttcaaaatctaagaaatgcgcatgagctagaatctcttttttggttggcttacgattgggatatttgattacttctttattttcacgcttgctaaaaacctttttgattgcaaaaggtcgacttctcacagcagatgtaatatatacctgatcacgtgtcagaccaatctgcttcaatgatttatccaattccttacccgcatccccgctaaagggaatattattaacaatttcatttcgaccaggagcttcaccgacaatcattaataaaggatgttggggacccgagccagaattaattccttctagctgcatgcctttagatcgttctttcacttcgtcaatcagttttttcggataatccatttttccatcttcttttaaatttttgttttactcgactttactggggacatttacaaatgtggataactattatttctaacgctaattccacatttaatattattttttacaaaaatagcttcacaataacaaatgcctttatatcaagattagtaatagatatctgccagctttgtgatttttgtcttagtttcacaaccgtttcacggttgaatttcttcacaatcttttttcatcattactactatacagccattttatcattgtgatctttttaaaataaaaggctatcaccttctattaagataatagtcctttatgatatcagtttaaaagtattacacacagactaattatgcaacagtgtctgcaatattaaattagttgaaccgtgacgataatctaatggtgatgcgccatagtctttttcattacccaaataaagatagtttttggtacctttaacatgtaaataaagttgaggtgatttttcaccttctattttggttctatcaaccgttagtttagcgccagcacgataaagcacctttttattttgcttaaatttggcagtatacgcatatgcatcatttattaaagaaacactcacaggtcctttatcccacaacgtcttaccatctactaaagcaacgtctgccgcattgatatattgtgttttactaatctgaaaataagtatgatcaccttgttgaattgcaggtaaagtcatcttagttttattttgataataataaaattgagtattagcagccgctttcttaggtttaccataatagtttaaaaccgtgccttgctttagatttttattcttgaattgcttgcctgttgcatcataaataggtgcattattatttaaaaacacggttcccttgccattcaaagtagttacttggctggcatcaatataaccgcccttaccaatattaaataattgcttaggcgaattatagtatggtacctcaatttttggtttttgtttattagtaaaataattcttgccaccattatagctaactaattttttaccatttttatcataaatataatttttcttgtgccgaaaatgtaacttgaccgtatttgtgttaccaagccaggttaacacatcgctttctttaacatagcctcctttaccaatcgaatagtaaagcttaccaccaataattcgactagttggcacaggaatcccagctgcaaagcgctgctgaataatataagtcttgccactatattttaaatgagtaccagctttgatattttgatgatatttcgaattataattacctgcacgatcataaattattggtgctttatttacctggattgtattcttagctgcttgggctttcttcgtcgttgcttgtaccgtagtcgtgatattgggaaaagataatataggtgctactgtcaatacggttgctgccacaagtgcaaatttgcaattgaacttcatttatttcacctcattcattccataactccatcatagcattttatatacaacttttgggtagaaaaaaagccagttccactggaactgaccttttttatgattgacgttatgattaacgacgtgcttcagcaattcttgctgacttgccgtgacgttcacgtaagtagtaaagcttagcacgacgtacacgaccatgacgcttaacttcaaccttagcaacacgtgggtcgttaactgggaaggttctttcaacaccaacacctgaagcaatcttacgaactgtgtaagtagcaccgatgccagtacccttcttcttgattacaacgccttcgaacaactgaatacgttcgtgagtaccttcaacaacacgtacatgaacagtaacagtgtcacctgcacggaatgcaggaatatcgtcacgaagttgttctttagttaattcttgaattaatggatccataatatacttttctccttcttcggcattcatcaacgtaccaacgccagcggaacacccctaaacttattcattgtggtcacgccacgatgaatagtatatcaagtagagcttgcttaatcaagctctgctttaatatctgccaacattttcttttcttcagttgttaaaactcgttctttgagcaaatcaggtcgatgcaaatatgttgttctaagagcctctttatgccgccattgtgcaattttttgatgattgccactagtcaatatctctggcaccttttgcccttcaaaatctgctggacgcgtatattgcggatattctaacaacccatgtgaaaagctttcttcaactggactagctgcattgcccaaaataccaggtaaaagtcttactgtagcatcaatcatactcattgttggcaattcaccaccagttaaaacataatcaccgattgaaacagtttcgtcagccaagtcataaacccgctgatcaaagccctcgtaatgtccgcaaataaaggttaattcatcttctttggcccagctttgcgctattttttcattaaaagttttaccttgtggtgcagtaataattaccttacctgtggatggtaacgagtcaagtgcttttttaatcggcataatttgcaaaaccatcccagcgccaccaccatagggcgtatcatcaacatgatgatgtacatcggtagtgaaattacgaaaattaactaaattaagctcccattttttatcttcaagcccacgtcccaacattgaaacttgcaaaggagcaaacatatcaggaaaaagtgtcaatacattaatcttcatcgcgtaagccctccaataactcaacatagacttttttattagctacatctacttttttaaccaccgatgcaatattaggaatccaatactctttaccattatcttcatggactagccaaatatcattagcaccaggcgattcaatatcagtgattttacccaagcgcttaccggattcttcatcaatgacatcacagtcaaagatgtccttataataataaacgccttcaggtagttcaccgcggtcggcttcactaacaactagtatttttccttttaatttttcagcttgatcaatatcagtaatctctgcaaattgaactaaccaaaattgcttaaaaggtctactcttggccacagttaaaacttgagaagtttcacctttgattgccaaatgcatccctatagcaaaacgatcttcagggaaatcagtaattatactaactttaacttcaccattcaaaccgtgcgtagttaaaatccgagcaacatcgtaatattccattttttctcctttaggtataaaaaaagcttgaagcacacggcatcaagctcttaattaatagcaaaattacttattgtattttgcatcgtgcaacttagccatcaagccagcacctgaaagaagtgatctaacagtgtctgaaggttgtgcacctttttgtaaccattcaaagatcttgtcttcgtcaagcttcaattcctttggttgtgaaactgggttgtagtaaccaacttgttcgatgaagcgaccatcacgtggcatacgtgagtctgcaacaacgattctgtaaaatggctttctcttggcaccagcacggtgcatacgaattttaactgacataaattaatttcctcctaaaacttaacgattaataatataccaccaaacttaacaggtgtaaagtatttttccttaacagtttattttttaagaatggaatctttttaccttgcgtaaacgcttcttcttatttttcttgaaattcttgttcattcggcgcattgccatcttagccattggcgaatccattccaggcaaattgctcaagcccttcatatttcctttagacattttactcatcatgtcgcgcatttgcttaaactgcttaatcatcctattgacttcaactacaggacgacctgaaccagcagctattcttcggcgacggcttggattaagcatatcaggattttctcgttcctcaggagtcattgaataaacaattgcttcagtatgatcaatttgcttttgatcaacatttagattctttaattgcggattattagatagtcccggaatcatcttcatgatttggtcaagaggccccattttttgaacttgttgcaattgatcaacaaaatcattgaagtcaaaagtattttcccgcatcttttcagcgactttttcagcttccttagcatcataatcttgttgggctttttcaattaaggaaagcatgtcacccatacctaaaattctggatgccattctatctggatggaaaacatctaaatcgcttaatttttcaccttgaccagtaaataagatcggcttaccagttaccgcacgaattgaaagagctgcaccaccacgagtatcaccatctaacttagtcaaaatcacgcccgtaacatcaaggcgttcgtcaaagcctttggctacatctgttgccgcctgaccagtcatggcatcaacgactaaaagaatgttatcaggatgggttactttctttacccgctctaattcttccattaaaggttcatcgatttctaaacgaccagctgtatcgatcaaaacatagtcattcttgttcttttcagcctctgcaagtccatcttgaacaattttagctacgtctttttctccgtcttcactatatactggaacttttaactgatcaccaatttgtttcaattgatcaacagcagccggacgataaatatcgccagctatcaacagcggacgggccttttcggtcttttgcaaatgataggctaatttacccacagtcgtagtcttaccagttccctgcaaaccaaccatcataatgatagttggaatatgcttagacttgtttaaaggaactgcttcttcacccatcatcttcgttaactgttcattaacgatcttaattacttgttgacctgggtttaaactttcctgaacttccttgccaagggcttctttcttaatggttttaataaagtccttaacgaccttaaagttaacgtcggcttctaacaaagcaagtcgaatttcacgactagccttattaatatcttcttctgagaccttacctttgccagttaaattttttaatgctttttgaattctttcacttaaattttcaaaagccatgggctattctcccctcaattgatttaataaattggttatttcttttttagcagcttcactatcaccattatctaaagataaaagcgtatctgccaagacatcttcaacctgattgttgtcgcgcttcatatgcaatttctcttcatagttctgaagaattttacttgagcgcttgagattatcatagacagcctgacgagatacttgatgattagcagctatttcgcctagagacaaatcattgtagtaatagtcttcaaaataagattgttgcccctgggttaataaagagccatagtaggcatataaatcgcctagctcctcgtttttagttagttcatccattgattttcaccagtctttagtataacaaaggtcataagctagtgctagattaacctatcttagataacaatttctaaaaaaagtggaatttcaaatatgtaatagttgattttttaacgtacttttaattataattagatgaatatattttaacataaggaggaagttgcgttgtgaatctttggcagagaatgaacagtaaagaagatccacgcgtctatgaaaataaagatggacacctggtgcgctcattaaaagtaaaggacttcttagctctaggtgttggaacaatcgtctccgcttcaattttcactctacctggtgaagttgcagctaagcataccggccctgcagtagcgatttcctttattttagcagcaatcgctgctggtttagtggcttttgcctatgcagaaatggctgctgcaatgccatttgcaggatcagcttattcatggatcaacgtagttttaggagaattctggggttgggtagcaggatgggcccttctagcagaatatttcattgctttggctttcgtcggttcggggctttctgctaactttagagctctaatcgcaccattaggttggaaactacccgcgtcattatctaacgcctttggcaataacggtggtattattgatatcatttctttagtttcaatcttgttagttgccttattaattggtcatggtgtttcaagggcagctcgcgttgaaaatgccttagttgtattaaaggtgttagccattctactctttattgccgttggcgtttttgcaattaaaaaagttaacttcaccccatttataccgaaatacaagatgactgctaacggtccattcggtggctggcaaggaatctatgctggtgtttcaatgattttcttatcttacattggctttgattcaatcgccgctaactcagctgaggcaattaatccacaaaaaactatgcctcgcagcattttaggctcacttgctattgctgttactttatttgtcggagttagtttagttttaattggaattatgccttatcagaagtatgctaattccgctgaaccagtgggtttagccttacggtttgctggtcatccaattgttgccatcattgtccaaaccattgctgttttagggatgttcactgctttgattgggatgagtatggccggttcaagattgatctattcatttggccgtgacgagatgcttcctaaatggctgggcaagttgaatgcagatcgtcgacctaataatgctttatggacattaacaatcgtagcaattttacttggagcatttttccccttctccatgttgtcacaattggtttcagctggtactttaattgcttttatgtttgtttctttaggtatttataagttgcgtccacgtgaaggaaaagacattgatgatccttcattcaagatgccattttatccagttttacctgctttaggtttcatggctgctttaattgtcttcttagggcttgactaccaagctaaattttatgctggtatttggtttattttaggcttaatcatttactttagctatggtgttcgtcattcaattttaaataagcaaaataaataaaattaatctaaatacagttaaaaagatctgcattttgcagatcttttttcgtaccattattttttcaatacaattccttcatagagttttactgtaattaagtaataaagcaaatacaatactaaaaagatcgtaaatggaatccaaattttatcgtatggattagctaaaatccctttgaaaaattgtagtccaaataatacatcaatcacacccaagacagccggtaaagcgaacaaggtaccaatctccgctttaatcgagctctttaataacttacgtcttgatccgaccttccacaacatttcatatcgaggacgatcactgtttgctcctgatagcactttaaacattaaggttgaagctaacatagctaagaaagctaagcctaagaagaagcccataaattcaaaacctgacgcaacgcttgctactaagcgatattgagcagatttagaattattcagagaaacataaactccttgtgcatccttagtaactgtctggtcaagtgacatcttttgcaatttttcaatattattaaaattacttctaaagttattgattaatagcaaggttacttgtttgttttttccaggaatcttcacatattcagctggagttacaactttaacctcataatcagaataaggtgttaaactagcaagttggaaattcatctcttgttttttattctttacacctgcaactgtaatcgtctttgtcttccaattcatttggtcgccgttctttcgaccagattggaatttgatttttttcttagcaatttcttggtcagtaacatatagaacaggaaacttctttttcccattgaccttataattcaaagtcgtttgttttctaacggcaacttttttaagttgttgattaactttagcatcccttttatacaacacagcatcataatatgttgcctgaagagcagtctctgtcatattattaaagtttaatccaacagtgatcgcacctaatgctagagcaaaaagcaaggaaataacagttaaaactctattgtaatcacctaacctaaattttagctgacctaaggtaaaagaatgcagtttactgtatttaaactttttatttttccgtaaagcattgataactgtagtaaatacagaatcaaatacaaaatatgaaccagccaaaatagtgacaaaaccaatttcaaccgatttaatttgcaactgatggtaatcccacattgcccagtagccaatggctagaagggcaaggcctagaattacttcagttgctttccagattcggttattacgtaacttaactggtttttgatcctcatgcaaaagcttgattacactagtacttaccaatttgtgccgattccaaattgcagccaagaaaaataaaactacaaagaaaacaactgtccataaaatagccggtaaataaaagcctaagaatttatgcagctgcaaacccagttgagagattaataactgagaaacaacttgagtcaagccgataccaattaaaattcctaatgcagtagcgagtaaaccaataacaaccgtctctgtaaaaattaaacggccaattttactatttctcgctcctaggatcatataagtaccataatcttttttacgcatactaagcaaaaaactatttgcgtaaacaatatagactagggtaataatagctaatagcgctatcccaaaaataaagaccatctgggtaattgaaaaggcaatggccattgaacccttaagaaaagctggattaattgcaatggtcataaacatataaaagattgcagcagctagagttagccccgaaaacaaaacagcataatctttaaagcgactttttagccctgttagtgataatttccaaagcacgtctatacctccctctaacgtctacctaattcagcaataatatcttgataaaattcttctctggtcttattttcttttttaatttctttgccgatttttccatctttgatgaacaaaattctttgagcgtaagaagctgaataaggatcatgcgttaccatcagaatcgaaacttgatcattcttattcaagtctgccattgttttcaataattccgtagctgattgtgaatctaaagctcctgtaggttcatcaccatataaaattgccggattatggaccaatgctcgagctgaagcaacacgctgtttttgaccaccagaaatttcagctgggtatttgtccaagatagattctattcccaatcttttggcaatcgccattgcttttccgtcaatatcctttgccttcactccttgaagcgataatggcaaggctatattctcgcgattagtcaaattatctagcaagttgaaatcttgaaaaataaagccaatttcttttccgcgaaaatctgccatttgattgttcttaagtgcagtaatgtcttgcttattgactaaaacatgtccactagttggcttatctaacgtcgacaagatattcaataaagttgtctttcctgaaccagaagcacccataatgccaacgaattcaccttgttcaatggcaaagctaattccttttaaagcttggtattgcttctcaccttttttaccataagtcttagttacttgatccactcttaaaatttctgacatttttatcctttcactaataatattactgttctatttacttaatacagtaatattatattaaagatttgtcaataatttttgcataaaaaaactccaaaagtaattaacttctggagttctactattttacattacttattgtcttcactcgacttaagcatctttttcagtacattaaccaagccaagagtttcatctttactgagcatccctgtaatagtttggtcagtttctgcacggtgcttttcaaatttcttgcacaaatctttggcagccaatttttttgtcaaagatttgaccttgtcattagttacatgcaattctttagccaacttttcaaaagttttgccatgctgatgatgatttaattcaataagcatttccaattcattagcattaataccaaattttttaaatcgttattcatttgtttttcaacttcattgttaatcttagtaaaaaatgagccaatagtaccttctgccattgtctatattcctttcatttcacatattataaaaaacagccctttttcgagctgttttgaatttattaaagattttcatccatattgaaagtaagtttggacatgttgatcgattcaatcatcatttgaccccaaagcttttcagtttccttacgagtatgggcaacagtcttttgattttccttagtcaaatattcagttaattcatcacctgatttaccttctgcaccagcaataatttcttcaactcgacctctgaagtagcggttaagttcagttaaataagtagtatcaagctgaacaaattgtgggtaatgactttcaacgatagctgcaaatgacttgtaataccaccatgcatcattcatattgtaatccattgaggtattgttatatgaaggatcagtatcattcatattagcaaagaatggtacaaatggagtgaaagttggaccaccgatacataaccacataatagccgcacgatctgctggaacatcacttctaatttgcaaaatatgagcattttgcgtacggttcaaaccgattggacggtagcgatgtttttcttcatccgtacccttaccaaatggatcatacggggtatcttggtagtgtgaacctaaagcaaattgaatatcttccttagtgatcttcttagctgccttacgaataaatggaatatcgccatcttgtgggttttgttcaatttcgggattgaacaatttttgaatataccattgacggttggtgttgtagtgacgatcttgttcagtataggtaccaaaaatatgacggaagttccagccttcatgatctgggttcaaatggtgttcttcaacaaattcttgaatacctttactccacatgaagtaatcaggattatcaaagtcaacttgttcaatcgcaactcgattaccagttgcagcgtaacaatcatctggaatgcgctcggctacccagtggtgacctgtaacaatttccatgtaccaaatttcatctttatcactgaataaaactgagttaccagctggtgaaccgtacttagcaattaacttacctaaatattgtacaccatcacgagctgaatgaatgtatggcaaaacagaagtctgcatgcagtcttcatctaatccatctttaacaagtggatcaaatgctaaagttctctcattaccataagttgattcagtacatgacattgcaacgttttcttggttaattccactttcatcgtagtagccacgatgcttgtagtcaacattaggaacagctggtacacgttgcgcatcttctggcaagtccatttcaaacttgtttaaccatgacttaatatgtttcttttcaccatgacgggctggctcaataatgaacttttgtggggtaattggacgaaaagtgtcatcattacgagcaatcatagtggtgccatcaatcgaggcatttttaccaactaagatagtagtacaagcactatattctttcataaaattctccttataaaacaatatttacatctctaactttatcactagaccaagccgtggaaaagaccgatcgcataatttgcagcatcaaaatcagctaagtcttcagctctttcgcctaagccaaccaatttaaccggcaaattcatttcgttacggatagctagaactacaccacccttagatgagccgtccaacttagttaaaacaagcccagttaattcggtggtcttgtcaaagtctttggcttgcaaaagcgcattttgcccggttgaaccatctaacacaagcaaggtttctgttggctgatctggtaaaagcttcttgattgttctttgaattttttccaattcagccattaaattcttcttattttgtaagcgtcccgcagtatcgactaaaagatagtcagctttttccctgattgcccgttcagttgcatcataaacaacagaagcaggatcagccttttctttaccagtaactacgggtacgtcaacacgttttccccattcaactagctgttcaacggcacccgctctaaaggtatcggccgcagctaaaattactgactttccttcatccttaaaacgtttggctaacttaccgattgtagtagttttacctgcaccattaacaccaacaagtaggtaaacgttaggtttagcttcagcattatacgtcaattgctcatcttcgctattgccacctttatcgtaaaggtcaaccaacttttcaacgattactcgcttcaagtcatcacgtgacttagcattttgcaatttagcctcttcacgcaattcattagttaattgttcagcagtttcatagccaacgtcagattcaattaataagtcttctagatcatcgaagaaatcttcatcaactgttctaaacttggcaaaaaaggcgttaagtcttgcaccaaatcccttgttagtcttttctagccccttttcataaagctgttcttgtgattctgttggctcctcatcagaaacttcagtttcttcaacttgttcttctgtttcagtctcagtagtctcttctactttaacttcttcaggctgttgtttagaatctaaatctactgctttttcttcatcaccagattcagcttctacctcagagtcttcttgtgcttctactgtttgttcttcttcatcagtagtttcagttttcgatttagcttcatcaactactttttcagattcttgatcattatcttctgattcagtcttagcttcattttcttgctcagtctgtttttcttcttttttgttttcatcctcttcgtcttttttaccaaagagtgatttttttattcgatcaaataaacccaactatttcacctcatttttattcttcatttcttttaatgaaaccgacaatacttgcgaaacgccagattcttgcataaccacaccatatagttggtcagcctgccgcatcgtccctcgtctatgcgtgatcacgatgaattgggttttcatatcgtatttaagcaaaaattgcgcaaaacgagtaacgtttgcatcatccagggcagcttctacttcatcaagtacacaaaatggtaccggattaacctgcaacatggcaaacaacaaagtaattgcggttaacgcgcgttcaccaccagaaagcagacttaaacgttgctgctttttgccaggcggctgtgcgataatctcaattccagtttctagcaaattattaggctcagtgagttccaatctagctttaccgccaccaaagacaactggaaaaatactcttaaagctagatgctacttgattaaaggtactcttgaagcgcgtcttaacttcttcatctaactcgttcattgacttttcaaggtcatcacgagcttttaacaggtcattttgctgaccattcaaaaagtcatagcgctttttcacatcttcatattcttgaatagaatcaagatttacttggccaatatcttcaattgacatgtgatgcaacttcacgcttttagccagttcattgcgcttttcttcagtattttcgccttctgcttgctctaaagcagcttcaaacgttaaggcatactcttcactcaaagttgacaagcgctgatcaattgcggaattaaacttcgcaatctttactgagtaatcttcttgttcaattgctgcatctttgcgtaaatcataattacgactggcaacttggtcaagttgattaatctgcgcatcaacttgtcctaattgcgcactaagttcattcagcttcttttgcagagtttcattcttttgcttaatttcagctttttgtgtttgtaaatcagaattctttttaactgataattcaccattttgacttaattcagttaatttctgctctaagctatcagtttgcttctgattattagtgatctgaatatttttttctttttcctgactagctaagttttccaacttattagtataaactgcaatttgaggatcaagctttgataattcctcttgtacacgttgacttaagctattgaagttcttaatcttttcttgcaagtcattcattttgcccttttgtacttcattttgcttagccaattgttcctgctgatcattagcctgagtgatttctttctttaaagcagcaatccgatcttgttgttcttttactcgagatttatataaactattagcatcagttagccgctttacttccttttcttgattttggaaagaaatagcagcttcattaatcgcttgattagtctcctgcaaagtatcacgcagttgttgcaatttagccgcaactttttcaccttgagtaactagctcatctaaccgttcttgatcttcagccaaattttgtcgtaaagtctgtaattgcttctctaactgattaatttcagttgccgtctgcagtggtgaattattacgttggtttctttgaccaccagtcatcgaaccacctggggaaatcacatcgccatctaaggtaacaatccgatagcggttaactcgacgtgaaattgacattgcactatcaatcgtatcaacgataatcacactacccagcaaataattaatcgcagcagtaatatcttgatcggctttactttcaactaaatcacttgctacgcccttaaagccactaaaagattgcaaagtagtgatagttgactgtggaatagtatattgacgcaagccatctaatggtaaaaaagtagctcgtccactacgactacgctttaattgattaattgcatccctagcactaactctgctttcagtaatcaaatcctgtacgccaccgccaagagctgtcgtcattgcagcttctagctcaactggaaatgtaatcaattcacccacagccccgatcacaccagggaaatcagatagatgattcaaaacattacgtacaccgtagtaataaccctcatgccgcttttgaatatttactaaagcttcatgtcgcgcttcaactttctctaatttactgcgctctgcgttaacggcttgccgaatctgattaatctgtttagttaaatcattattttgatcattaacttgcgcaaatttttctttttccttttgccgcttaactgtcagctgcttgccttcagttctcagcttttccagttcagtccgagcatcggttagctgcttgcttacatcactattttgataagtagtgtctgcctgactacgttttaattcagtattcagattaacaatctgattattagttgtagcctgatcttgtaaaagttgaatatagtcgttacgacaatcttctagtcgcttactcaattcttctggatcatcgtgcaatttaccagtcaattgatcatgctgctcttgtaaagcatcttgctcctgcttaagttgctttttattccgctgcagttcagacaattcatcctttagcttaaccaagctatttttcaattcttcaacttgacgttgagtttctaccctagttgaattattaaactgttgtgattgctgtgcgacctgcaagttagtattgatctgtgataattggtcacttagctttaataattcactctgcgtttgctctcgctcattttgaattttttgatattctgcccgtttttcagaaacagcactttgcgaaccttttacttcattatccagttttgttaacaggatttggttcctatctgctgctttttggacttcttctttttgccggtttaaatcctcaatttcaaaagctaatagactttttaatttctgatctagtcccttcttttgaaattgatattctttagccagcgaactttgctcatgcagcggctccaatcgaccttcaagttctttaaccaagtcattgattctaattaaattatccttggttttctccatttgcgccttggcagcttctttttgttgtttaaaatgcaaaacaccagcagcttcttcaaagattactcttctttgttcaggacgagaatttaagatctgatcaactcgaccctgagaaataattgctaggctattaggtgaaattccagaatcaagaaagagtgtccgcacatctcgcatccgcacttgctgattattaattaaaaattcactgtcacctgatcgcagaaatcttctagtaattgagacctgatctgaatcaaaagccaactcacgctctttattatcaaaaactaaagtaacttccgccttattgagcggcttgcgaaattgactaccggcaaagatgacatccttcatattcgttccacgtagtgacttagcactggattcacccattacccaacgtacggcttcagtaatgttacttttccccgaaccattaggaccaacgattccagtaattccatcatcaaaatgaatagttgtcttatcagcgaatgatttaaaaccatcgagcactaattctgttaatggcactttttcatccccttatttttctaatttttgtaaagcgaccttagcagcttgttgttcagctgctttcttattgtgaccctcaccttttgattcaacttttccgttaatttttagttcaacaacaaagtgtgaaggtaattgagattcactaataacggtgtattcgatattcacaggaccatcttgctgcaatacttcctgcaagtctgtcttatagtcgcgtgaatcatcgaattcacccttatcaatcaatggataaactgttaaatgcaaaaaatgttcaactgctggcatcccttgatcaaggaaaagtgccccattgaaagcttcaaacacgtcttccagtaaagttttgcggtgtcgtgctccagctttttcttcaccattgcccaagtgaatctcatcttgaaaaccacattcaatggcgaattctgaaaatccttcagttcggacaatattagatctcaaacgagttaattcaccttcattcaacttaggataatgaagataaacataattcgaaacggctaattctagcacagcatcaccaagaaattcgagtttttcataatcgcgaattccatcattgggatgttcatttgaatatgaagaatgcgtaaatgcttcttctaatagcttttcattgttaaattcgatattataatcgtcttttaatttttttaaaaactttgtacttaccataaaaatgcccctttttatacctataaattataccagttttcgggtcacagaaaaaagactgcttctaaaatttagaaacagtcttttgtaattttaaataattgctttacttagcgtaagcaacattgtaccagttagggaaaccattacccattgaatccgatggcttaagtgagtaaccagtaagcttcttgttaacggcagtaattgagtaactattagctataggaattacgtaagcttcatcaaacatgtacttttgccattcttggaatttttcaactctgtacttgtggttgaaggccttctgtgaatccatttcgtcaagtaacttggtgttttcaggagttacgaaacgtgagtagttcattggagccttttcgctatacaagtcattaggtgatggttcacttgataatgaccatgcaccaataaacatatctactgatggatcatcgttttgaaccttgtcgtagaatgaattgaattcgattaaacgaccactagttaacttaacgttcaagcccatcttcttccattgttggatgtagttttgaacgattggttctgctgttgaactaccagtcatagcagctaaacgaatagttaaaggcttgccattaggttgtacacggtaagtacccttcttcttgtagccagccttgtccaagatttcgttacccttcttgatattgtaagtgtaacccttgatgttcttgtcgaagtaatcaccgaattgcttaggaattaaagttggaattctgaatgataaaccgaatgagtagcgcttgtaaacttggttaacattcataccataaccaatagcttgacgtaaggccttgttattcatcttagaattcttgtccattacgttttcgcccttcttggcatcccacttaccaaccttaaagcctaagtatgagtattgtagtggaattttagcgataaagttaacgcccttagtatccttgatgttcttccattgtgagttgattacttgagtaacgtcaaattttctggacttaatactttgagcaactgagttagggttaattactgtagcagtaatctttgaaagctttggcttacccttgtagtagtattcgttaggaacccaagttactgattgaccacgaacaaccttttgcaacttgtaagcaccaaagaacaatggcttcttacggatcttatcacttgacattaagtccttgaatttaacatctttcaagtagtggtaaggagcagcagcttcccaaatgtaaccattacctgaagtgttcataccaggtttcatcgtcttaaagtgaagaactgctttacggccgttttcaccatctggcatttcaaagcctgagatagtctttgacttaccttcatggtattcttgtaagccttccaaatcagctaaacttgaagtgtaacgttgtgacttagtgtctttgttagcaataatttcataagcgtattcatagtccttggcagtaacttgcttaccatctgaccacttaacacccttcttaatttcaacagttacggtcttagctttttggtcaaccttaattgttgcagcacctttatcattgaaaacatagtgatcatcagtaccaaaaagtgattctgcaccatattgcataacttcagtatcagtagctgaagttgaaagttcgtcgttgaagataccagtaaatggggtatcagcttcaacagcaaccttaacagtaccgccattcttagtagccttagtaggaacagcttccttaaacttagaagcagtctttgattcatcagaatgagattctgacttaccacaggcagctaaggtaagagctacacctgataacagtgtaataccagcaaaaagttttgcctttttcattagtaaaattcctccattacttggagcaagttgatcctttaattttatcactattacaaaaacataacaatagcatgaaaaagacaggtatttggattaagatacctgtcttttctattagttagttattagaatttaatataaggaatttgtttatgtttagaattttggagtttagttttactaatgattaatgaattacttagcgtaaccaacattgtaccaaactgagttagcatctgaaggcttaagtgagtagccagtaagcttactattcacagcgtcaatttggtatgcattaactgttggcacaacatatgcttcatcaaacatatacttctgccattcgtggaatttttgtactctgtatttattattaaatgccttttgtgagtcaatgtccttaagaagctgagtattcttcttagttacgaaacgagtgtagttaaatggtgccttttcattgtaaagatcgttaggagaaggttcgctagatagtgaccaaccagccatgaatacatcaacgtctttagagtcatgttgaactttatcatagaatgaattgaattcaattagacgaccagttgttaacttaacattcaagccgatcttcttccattgttgaatgtagttctgagtaattggttcagcagtagaactaccagacatagctgcaaggtgaatggtcaaaggcttaccatttggttgaacacgatacttacctttcttcttgtagccagcgtcatcaagtaacttattagcctttttaaggttataattgtatcccttaatatttttgtcaaagtaatttccaaattgttcaggaattaaagtaggtactctgaatgttaagccttgagtataacgcttttccacagcatcaatgttcattgcataggccattgcttgacgaagtgacttattgttcatctttgcctttgggttcatgacattcttaccattttcccacttaccaaccttgaagcccatgtagctgtattgaagtggtactttagcaacaaagttaacacctttagtgttcttaacctgttgccattgtgaattaacaactctagcaatatcaaatttgtgactcttaatagcttgagaagcagagttagggttaactacagataccgtaattttatctaattttggagtacctctccagtagtatttattaggaacccaagttactgattgaccacgaacaattttactaatcttgtatggcccaaagaacaaaggattcttacgaacagcatctgatgattcaagcttattaaatggaatactctttaattgatgatatggacttgcggtttcgaggaagtatccgttacctgattgaagcatcccaggtttcatttccttaaagtgaattacaactttacgtccatttgctccatctggcatatcaatacctgaaatagtcttagctttgccatcatgatattcagttacaccaacaatgttttgaagtgaagcagtataacgttgagactttgtgcccttgttagccataacttcatattcatactctacatcttttgcagtaacctgcttaccatcttaccacttaacaccttttttaacttcaatagtgatagtctgtaagtgtcaatgtttttgcggtagcctttaaaccattagtctaaccttaatttcttaaatatttatatgacttaaatttctgcttagcttgcttaaataactattgccagctacctgtgcggttaatgcgccatgctggatgcctaaatgaacttcatgacgcttctttaagctgtcacgggccgctgcttttaattcctgttcagtcaatacagttatttctgaatcttcaaactcgctgctaagccaaaattccagctctcgattcttgatgcagcttaagatcctaagcatgccttctgctccagattttgaccatttcttgccttgccccttaacacggtaggtatacttgcggtggttgctctcgcagcagccaatggctttagtcacagtcagttttcgtttcttaaacggcttaatatcgtcccaatgacgatcaatataattccttaggcgccccagataatcatgattgagctcggtattcaattcatcaattagtcggctttctgcagtggttaggatagttttaactttgtcatagctgtatttgtattccaaagcagaaatcagcttgccttgcaggtcaggcgcaaaatatagcctttctttgattttcttatttaggtgaaagacatccaagaaatgctcatgacgcttgcatagccctacaatgtcatcgaagtctgttttggcatatccagcaccgccatcggcgttgctaagaattacagtatcagaaagatcataagtattggccaggtactccttggcttcgttcagcgcatcaagtcggcttaaagaaacaaattccttggcattgattcgctttctgcgtttcttgcttatattgacaatgccttcacagacctgatagcgatgaaattccaaccggcttttagtgcctttgatcaccacgccatcgccttcaagatacaaaactgggacctttttcttagtgcctgcggcatcatatcttgaatctgcttcttggccagctttaatatttttcccggccatttttaccaaattgcccacctgcatatggctaatattaaagccagacaggcaattgactgctagagcagtattgcgataagtggcaacgctgcttacttctaagatgtttttgactgctaaaatactgtagcgcttgtatttgtcaaagcccattaattcatccaagggataccttgcttgtttgcctgggcagacatatcttcttctgacatacctaacttcgccaaaagccatattgattgagcgctcattcttcttatcaatctgatagccctgtgctttaaccttggtaatcatttcatcatcaactttagctaaagccaaggccatgatttccttaatcaggtttaagaagaaacagattatttttctttcacgcttaatataattatcttcagactttataatatttgcgatttcagttacaattgaattcataaaagaccagcttctaatgtgttttttgttcttaacatcagactactggtctttttgtttgagctcaagtccaaattcaaaggacttgggcttttttaattatttattcaacttaccgtaaaaaattatacacttagtgatagtcttagctttacggtccaacttaaaagttgcaggtcccttgctattaatcttgtaactgtcatcagtatcaaataatgattcattaccaaactgtgctacatctgtgtcaatagcagaagttgataattcattgttaaaaatacctgtaaaaggtgtatcagtttcttcagcatatgataaagtgccgccctttttgactgccttaactggagtagtttccttaaacttcttggcatcctttgcgccagcattgttactgctactcttaccacaagcaactaaagctaacgctgccgcagaaacgactcctactgaacccaatacttttgataatttcatactttgtttcccccatctaggatacaattcattttcaatagttatttgaatcaggttgatgattaaataataccaccataaattaaaaattcaatagttttatgaaattatttttaatttttattttatttgctttcaataagattctagttataaatatgcaaaaacagctctaccaagcgatagagctgttttaatttaattattactttattagttttcacgttgtcttgcgtcaccagcacgttgtaaggcttgaccaacatagttaatacttaaggaaattaccaaaagcaagatagtagctggcaaccacaaccatggacggttaataacgttaactgggtcattagcaaaaccaatcaaagtaccaagtgatggcgtggtacttggtaaaccatagttcaagaatgaaagactagtttcaataccaatgttacctgcaatactcaatacaacgtcgataataatcattgaagtaatgtttggcaaaacttcacggaacataatttgtaaattagatgaacctgaagtcttagatgctaaaacatagtcacgaccacgctgtgataagacgaaggaacggaagtaacgtgccgtcgttgtccacccaaacatcgcaatcaagaataccaaagttacagcattgtagttagggataacagtagtcaaaacaataataattggcatttgtggcaaaatctgaatgaagtcaacaactctcatgataactgagtcgattgcaccaccaaagtagcctgataccaaaccaactactaaaccaactatttcagtaattacagttactgagataccgatcatgattgagttacgcccacccatgatgagcaacttcaagatatcacgaccaccatcatccgtacctagcaagtggcccgcttcaccccaaccatagtatgagtcagcaatattcatttctgttacttgggcacgattcaagaataatgaacctccaaaagtaaacagtaaaatgacaataatgataatcagagcagttaaagcagactttgaacgcacaatttcacgcattgccaccttgaatccagaaggtgggagagttgctttttgcttttcgtcttttttagtagctttctttgtagctttttctttcttatcagccattttttctctccttcctattgaattctaatacgtgggtcaatgatactcatgatgatatctgataataagttaccgattaaagttaagataccaaagataagaatcaaggcagtcaaggtagtgtagtcacgttgcccaattgagtcaaggaacaacttacccataccaggataactaaatacactttcaatgatcattgaaccactaagaagaccggtaatcgtgttacctaagaaggcagcgattggcaataatgagttacgcaaaatgtgcttatggaagacgacgctttctggaacacccttactacgagcagttcttacgtaatcttcaaccttgttatcaacaatcccagttcttaagtactgaacagtaccagtagtagtaatcaaggcatacagaattgctggcaaaatcatgtgatagattctactgccaagtacgccccagaaaccagaggcactagctgaaacagaaccagaaattgggaaccaacccaaggtgaaaccgaagagccacaaacctaagatgtagaatacgaatcctggggtagccaaggtgatgtagttaaaaattctaacactagtatcttgccattcgtcttggtgacgacctgaagtaataccaagagggatagcaatactataagtcaaaatagtagttaaaagtgataaccagaaggtgttgttagcacggtcagcaatcaatgaagttactggcacatgttgaatgtaacttgtaccaaggtcaccatggaacaagttgcccacccatctaaagtattgcacgtaccatggatcaaacagacctgcagcccgttttaaggcttcaatttgtttagggtcggtgttagggttaattgatccactgaatgggtcaccaggcatcattttagccaaaaggaagaccagcaaactcaagataatcaattgagggatcatgattaacaaacgccgtaaaatcgttttccacatgcttaatcactctccttttcttctaattcttcaagtttagcttcgtgggccatatcttttggcaaagctacccagtgcttaggtgctacttgttgtaatggatatacacgaccatccttgtcgtaccatttactttgattttcttcaaattctttttcaacttgttcgcgatgtttcttgtgttcttcacgatgttcaacatcaacttgaggaatagcggaaagcaaacgcttagtatagatgtgaattgggtgcttgtagatttcttcacggctacctaattcaaccaaacgaccacggtgcatgattgccaagttttctgacatgtgcttaacaacacccaagtcgtgtgaaatgaacaagtaagcaatgttgtattgttgttgaatgtgcttcatgaagttcaaaacctgtgcttgaactgacaagtccaaagcagacgttggttcatccgcaacaattaacttagggttagtagcaacggcacgagcaacaccgattctctgacgctgaccacctgagaattcatgtgggtacttgtagatcgcatcactaggcatccctacaatatccaacaattcttgaacacgatcacgttcttgatcagtagtcagattttcaaagtttctaattggctctgcaatgatatcttcaattctctttcttgggttcaaacttgacattgaatcctggaagatcatttgaacatctttattataatcaagcttcttacggttgcttgccttagttacgtccaaacccttatacatgatttgaccacttgtaactttttcaaccccaacaatcgccttaccggtagtagatttaccagaaccagattcaccgattaaaccgtaagtttcaccttcaccaattgaaaaattaatcccatcaacggcacgtacataatcagtaattctgttccaaaatccagagcgaattgggtaatagacctttaaatctttgatttgaataatttcttttgccataaactactccccacttgctgtcttttcatcctcaaagtggaatgacttccagcaagtacatcttacccagtgacctggcgcaacttcatgcaccttaggttcttcttcatgtgcgctagcaggaatccaaggaattcttgcagcaaatctatcaccagtacgtggcatattcttcaaagatggcacagtaccgtgaattacatgaagatcttcatccgtatcgtctgattgaggcattgagttaagtaatgatcgagtatatggatgaagtgggttttcaaaaattgtctttacatcagatttttcaacaatttgaccagcatacatgactgcaacttcatcagcagtttctgctacaacacctaagtcgtgagtgatcaaaataatccctgagtgagattgtttttgaatatcttcaagcaaatccaaaatttgagcttgaatagtaacatccaaagctgttgttggttcatcggcaataataacttcaggcttacatgcaatcgccatcgcaattacaacacgctgacgaagcccaccagacaactcatgtgggtacatttcgtacatttcttcaggctttggcattcctacttgattaaacaattcaatgacacgtgcgtgacgtgccttttcgtccatatcagtgtggtaataaagagtttcagcaacttgatcaccaacacgcatcaatgggttcaagctggctaatgggtcctggaagatcattccgatcttgtccccacgaatcttattgaaaagtgattcattcaagccaactaggtttaattcattgtaaagaatgtcccctgttactttagtatttttatggtcgtacaatccaatgatacttgaggcaattgtactcttaccacaaccagattcaccaacgatggctaaaatctcgtcgcgcttcagagtcagattaacatcgtctgccgcatcatagaatttcccttgcaaacggtatgccgtatgcaggtgttgaatatctaataaaagatcactctgcttctccaaaggtcattcctccatctcgagcttttttattaaaagcatttaatcttttctatttattttctaattctaaacacaaagccggtcgtatgcaaatcacgacacggctttttttagaaaattatccttgatgagacttaatatatgaaacagcatcaccaattgttttaattttttcagcttcatcatcaggaatttctgcgccaaattcatcttctagctgcaagataaattcaaccaaatcaattgaatcagcatccaaatcgttcataaaattagtgtcttcagtgatctcatccttatcaacatcaaaattatcagcgatcatgtctttaattttattaaaaatttcttcttctgacataaaacttctcctttttaataaaacattgtactatttttcagcgaattcgtctctaaaatctgcaacaagtttttctttaaccattttatctacttgcttaagagtgaaataaattggacgttcatttgatctaccgtgggttttaactaccggtgcattaacgcctagtaaaactgcaccgccatatttagccgtatcaaatttagattttaagcttgataacgagcccttcaccattaaggcacctaacttggtcattacaccgccatttaataaactatcttttaataaatgaagcaagacgctagaggttccttcaatgttcttaagtacagcgtttccggtaaagccatcggttactaccacatctgccttgcctaatagcaattcattaccttcaatattacctaagaaattcaaattactttctttaagcaattcataggccttttggtgaacatcatcacccttgtcgctttcagctccattatttaagagcattactcgcggatttttaatgccgcgaatcttctcagcatagtacgaagccatttcggcccattgtaaaagatattctggcttactcttagcattagcaccaacatcaaccatattgaagccatcgtcactattttgaacaggtaaagtaggcatcaaacctggacgaacaatccccttgattcgaccaataataaaaattccacaagcaagcaatgcaccagtattgcctaaggaaagcaacgcatcagcttttccttccttaacgaagttagctgccacaaccattgaagagtctttcttttttctgattgccttaactggttcatcttcatcagcaataacttcagttgtaggtacaactcctaattgatcattaatttgatcttcagggattagttttcttaatgcttctttatcaccaaataataaaaatttagtctcaggcattccagttttagcttgtaaaaccgccttaacgattgcatctggggcattttcgccacccatcgcatcaattgcaattgttctcatatattcaccacaatcttttctaaattctgttttgctctaattgcttatattctagcacttgcttaagtgccttatgtcctggatctaataaatcaggatcagccgcaaccaaagctcgtgcttctttttgcgcaacgaccaatgtattgtagttatttactacatcacccacacgaaattctggcaatcctgactgagccttaccaaacaaatcaccttcaccgcgcatctttaaatcttcttcagctaatttgaagccgtcattggtcgacgcaataattttcattcttgctttacctgaatcggtcttaggatcagctagaaagacacaataactttgtgtttgtcctcgaccaattcgaccacgcagttggtgcaattgacttaagccaaaacgatcagcattataaatcaccatcatattggcattagccacatcaactccaacttcaatcacactggtagttactaaaatatcgatctcaccagctgcaaatgcagtcataatctcatctttttgcgcacctggcatttgaccatgaagcaggactaccttgtgattaggaaaatcatggcttaatttttcatgcaattcttctgcattttttaagtctaacgtctctgactcggtaatcaatggtgtcacagcgtaaatctgaaagccttgatttagctgctcttgcatttgtcgatagacttccttcatttgactacttgttttccatgtggaaataattggctttcttccggctggtaaatgatgtatttcagagactgtcatatcaccataaactgtcaaagccagcgtccgcgggattggcgtagcggtcattgccaaaatatctggttgatcgcctttattaatcaaagcttgcctttgacctacaccaaagcggtgctgctcatcaataatgactagacctaattttttaaagataacactatcttgaattaaagcatgagtgccaattaccacattaatcgtgccatcagttaattcacggtagatctcacaccgctccagtgtttttgtattgcctgttaaaagagctactcgcacacctaaaggacgcaacaattcatcgatttttttgaaatgctgagttgccagaatttctgttggcaccatcaaagccgcctgatagccagctgtaatggctgcaaaaatcgcataaacggctacaacagtttttccagaaccaacatcaccctgcaaaagtcgccgcatttgaccatcagaatgcatatcagcaaagatttcattaaccacatgcttttgatcatctgataattcaaatggcagagatttagttaattgagcaatttctgtcagatcgtatttctttgcataacccatttgtttaccatcattacgggtcaataaagctaattgtaattcaaaaataaaaaactcacgaaaaatcgcacttctcttagctagttcagcctcatgactattcttagggtggtgcattttttcaataattacttggtcttttaaaagacgatattcttgccgcaacttttccgaaacaatatcctgcacttgatcaataaaatcgtcaatagccacattaattagatctactaattttttttgcttaacatgtcgattaaccggataaatcggcgccataccactatcattttctttggctgctacgaatttaaaggccgttaaactttgccgggcaacattgtatttaccataaatagctacttcttgtccgatctcaattttattttttaaccacggctgattaaaaaaattgaccatgatcacatcatggtcaattctcatcttgaaacttaagcgcgttttcttatagccaaaacgactaacaaacgcttcagtggctactattccctttagcattactttttgaccatccatgatttgatctaacggtaatgtttgtaattcgtcataacgaaaaggaaagtaaaaaagcaaatcataaatactatagatgcctaagcttcctaatgcagctgtagtctttgtccctacaccctttaagtctgtgacaggagcaaataatgcattatcaatcattgttattcaactgatactaagaagtgatatacagattgaccaccatcatgaatttcaaattcaagatcatcatgtttggcttcaagttgttcaactacttcttgtgcttgctcttcactagcatcacggccaaacataattgtgataatttctgaatcttcatccagcatcttttcaatcatatcaacagtagtcttaattaaatcagcattgtcaaccttaatcttgccatcaacaattcccaagtagtcattcttatgaatttctacttcatcgatttcagtatcacgggtagcttgagtaacttcacctgaaacaaccgtatctaagtcctctgtcatagcttccacattttcatcaacagatgcatctggattgaatgaaagcattgcggttaaaccctgagaaatagtcttagttggtacaataccaaccggaatatcactaacttcagcagcctgcttagcagccataacaatattaccgttgtttggcaagacaatagctttcttcgcaccagacttcttgattgcatcaataaagtcttgagttgatgggttcatcgtttgcccacccgagataatacggtttaccccttcactttcaaacaacttacgaataccgttacctgaagcaactgcgatcactgcaaaatcaactgcttcttgttgttcttcatcttggtcaacgatgctttcgtgttggattctcatgttatcaatcttgatcttgcctaattgaccaaactgactaccgtattggaaaacatcaccagggtgttcagtatgaacgtgaaccttagcaatttcaccatcagaaacagctaataatgaatcgcccaagccagacaagtgctttctaaattcttccaaatcaaacttctttttatttggcacatcggcatcaagatcaaccatgatttcagtacagtaaccatttttaatatcttgagtagccaattggctttgaactgaagattggtggtgcattgcattgatcatttcatccatttcattttcgtcaggttgatattgatctgcaaagttttcacccattaagccttccaaaaagccttcatagataaacaaaaggccttgaccacctgagtcaactacaccaacttgcttcaaaacaggcaataaatctggagttgacttaagagccttcttagcaccttcaactacagctttcattacttcagttacatcgtcggtgttattggccttagtagcaccggcttgtgcagcaacacgagctacagtaagaatagtaccttcaactggcttcattacagccttataagcagtagcaacaccatttgaaaaagcatttgctaattcctgtgcagttaaggtcttcatcccttgggtagccttgtaaaagccacggaataattgtgaagtgataaccccactgttaccacgggcacccattagcatacctttagccaagctttcagttaaatcactaacactagtacttggattttccgaaacagccttagcaccactttcaatggttaagttcatattagtaccagtatcaccatcaggaactgggaaaacattcaaagagttaacaaactccgcatttttaccaattcgatgagtggcaacacgtaccatatctctaaattgcttactatctatctcatttaaaaccactatttaaaacctccgcctgtgttattcgtcaagtaccttaacgctttgtacaatgacattaacggccttagtgtctattcctaattgattcttcaaattgaacttaacactatcttgaacattcttacttacttcagaaatcttcaaaccataaccaacaataatgtacacatcaaccgtaatttcgttatcttctgacttgacaacaacaccgcgcttataattggcacgattaagaatcccgtcaaatccatcgcgaatggcattctttgatgccatacctacaacgccatagttagacgtagctgcgccaccaacaacagttgcgattacaccgtttgaaatatcaatcaaaccatcttttgtcttgatcttaacagccatgtttcgtcctccgtcttattatctatatatacgtttattattttatcatagtaacgacataatcaataattaaaatacacctgaaaaaatccttttagtattgaattgcgcgaaaacatatgataatctaattaagtatgacatcacaattaaaggaggtttagcaaatggcaaaagattacgtaacaggtaagaagactacattcggtaacaaacgttcacactcattgaactcaactcgtcgtgcttggaagccaaaccttcaaaaagttcgcattcttgttgacggtaagccaaagcgcgtatgggtttcaaccaaggctttaaagtctggtaaagttactcgtgcctaataaccaaaaccttgttagatcaatattctaacaaggtctttttttactctaatatgctgttgtgcaacatttgtgcaacagcatttttactaaaaaagcatctaagtgacaaaccttagatgcttaatctgaaatttcatatagccagtaattacctagaagtctatagagacaattactgcagtagctatagtatacacgtttaatcatcaactgcatagtaagcaggtacaatcacatgcttatcataatcaatgtagattttatcattttctacttcagctaataatgctaattggctaatgtcttttaattcaatgactgctatcttgtcttctggtttatagtcaatgttataagtatctagtactaatgatccccagaatttttgagcttcaatccactcaaagctcattgtatctagtgcattcattaatctagcatcatcatacattttatgatcaccataatggagtgtagttactactacaaatttcatggttaaacctttctataaaaataagatagcctttaacagctatcttcagggtaatgttcttgcttttatagacaattaataaactcaacacagttattataacacaaaagaccacagctctcactgtggtcttgcttaaggattaaaaacgaaaaagcttcgcgctttctctatcaaaagaacaactatattgtagcacaaaatattattaagtgaacaaaaaccaccttgaaaattaattcaaagtggttttagctgacattatcgttgtttttctcttagcaaaataacatttacaacacttatattataacgcaaaaaagccaccccagacacaatgtccagagtggctttcttgatagatttagagaggaatttttcacttccttctttttttatactttgcagaatttagccggtacccattgcttatcagtaccaatcttatagtatttcacatttttaattgtttttacatcccatactttccaatttgagttagtgggaatgtatttatcttgataatgcccattactatctagcaatcttactttatagtttggattgttgttaataataggaacaaatacaattttaggtattttctctttaggctttgtaattggcttaggattagtcggctgatttgttttcttttctgaatgtaaatcaattagactaatattgccatctacgttaagaccacgccagttatcagtaaattgccaaattgctacgccttccattgatggaaagtaattaaagtcaggtgtatcaattctgcccatagttgcataagaagctacccataagcaattaccaaaacgcttaatcacttttttagtatcaatgttattacgtaaaacactagcacctgaatacaatccaaccttataacctgcattgtggcaaacgtccataaatgcaataattgcagcagtatttgatggaactgatctagtaactacattaccatcgccaacttcccaatctaaccatagataccgtttcttactaataccttcaatttcagcacggtgcacaaagaatttagcttcttttttagcacgtgaaaccgaattgctaaaagtcgcaaagtgataagcatgtaagtaagcatggttagcatgtgtgctcttaacttgagcatgtgccttaggattaaagtaacttaagccttcacttaactttgcaatcacgaatttagcaccatggctaatgtaatttgacatgctagtgggttgatatactgctacatccacgccaaaatacctaaccattattaacatctccctgtggttgattttcaggagcagtcaattgatcagtgggtttcagaatttcattatcaggtacaggagcaacagtaatttcatcgctgtcttccatgttagctaagtgcatagcatttactgctttttcaatcgcaccgttaattacgtttgcagtaacgtttttaatacctaaataatttaaaccttgtacaatcacttgactagcaaattcacgtttctgttcgtttcccatacctgtgtgttctgcttcatgaactgcataggttgcaagttgtcctactacatcaagtgccttgcctgctgtagttgccttgttaattttagctttatttctagcgtaaacacctgcgataattgcaattacataactagcaattgtaattcctaaatataaccagtctctaattgtcattttttaacttctttcttaattcatcattgtctttttcggcatctagccatttttttctgtagatttcagcatcctgttctttctgcttaatttcttcatccttttgctgtagcagtgtggtgagtgattgttgcttgctactatcaaatgctttataaaacagagttattgcactgatcacaccaccaattgctgtaataatgtatccccaattcactcatgacacccactttcaggcatcacaagcagttagataaacaaatccaaagattatcagatctccccatgctgaatgccccattcgatagaatggagtaaagatgccatgcgttaattgcaataatgctaaaaccatacaaacaataccaactattacaagaaatactttactagcaataattagcataattttgtatttaatattgttaatatacggaactaaaaatgcagatagcattaacaagattcctaacaaaattaggaagcagtcaatgtatctgctgttttcaatattctcaaactgtggaggataaatgaaataatggctatcatgaaacagccaaacacctttacctaaaataaaaagaccaattagcagttcacaatttctaattgttaatttagccttccactggtttagcttcttcattgctaccaccaacgatttcttggtattcagcttgagtaattaagcccatatcaatgtaacttcttaattcatcttgactgataaaatcgttatcaaattcaaacttgtaaatctcaaacattacttattacctccttcaacttctggtgtggtgttttgtgttggttcagtaggttgagtagcagctgcagactggttttgagccttaaccgcttgtaattcttttctaatttcacctacttgaacatttgacataatgaccaaagtagtaagcttatctaatttcttatcaagttgatcatttgattgagtatttgactgactgtttgattttaattcagtaacagcctcttttacatcttccacagtgtgaagtaaagcatcatctgaagtgtctacccattcatgagctgtgtagtcatacttttgatgtgtaaagtttggatttggagttttagttacataaggatagcctttatcactcatatcctttgtggtggtatatggaccatcacactctctgtattctccattaataattccagagatccaaaatgtattttcatttaattctgccattttattttcctttctttaaataagtatgtcgttcaatatcaacgacagtgttaattaactatgctttttgcataaaaaatagccatcgtgggcttcaattattttgattttaattgctcaatttgtgttttaagatcatctaaatcagattgcattacataatcatcataggcaggacaccagtctgttgattcagtacctttttctacttttaaagcatcaaatctaacctgagcagttgatgcgattttcaaacattgagaaaaattgccaatatagccaagattaaagtcgctatttgtcttggaattaaaataaccagatactttatattgattgccaacaatttgatgtgcttctacgcctgacaagagatatcgagagccatttgaagagtaaaagatgtaatttgaagcaaaattactaagaataacttgagcatctgtggtaaaccatagtgtttgagcataatatgtgttttgctctattggcaaataagtagttgcgtctttgtgaatacctttatttgaagctgcatcagttaaatatattgatcctaaattattagggtttagggtaatgaatttgccaaactgtatatttcctgctggtgttcttatctcacattttttagaattagcaagcaaattaggtcgaacaatgtcttttgctaatgccaattcttgaccaccaggtgcaaaaatattagccatataaaaactcctttctaagatataaaaaataagcgaatgtatcgcttaagtacgctgtcgtttatcatgaacgacagctttaattcttcgatgaatatctattgggtgctgccatctatagaccagcacctacatcttgagaagtaaagccatacaccgccaataccagattagtatatgaatagcctaaagtgtcgtcataatcggattttgtacggacagctaatgtggtgttgtccgtaaaccaaactgacatagctccgggactgccttcattatcacttcgcttgttatttatttcaccgcgtttcaataacggtgtgcgaaaattgttttcaagagtattattgtcagcatcttgataaaatacctttacaataatttggtaatattgaacatccgaatactttacatcagcttgactaaaatattttgtcatatcaatagtaaaagattgatggttccattcactgttattatcaccaccaatataaaaaatatttaggttttctgctccatttccattaagaaactcattttcacctagagcataacctagaacttttttgccatttatcgttaaagccatacggtcaccttctttattctgttatttcatacaacgtatttggatctttagtagcaagcttatcgtagtcagctttactaattacggtaggctttttcatatatcctgtttcaattgctgtaactctgttgttagtgttattcagatccgtttggttaaccttgcttgataaatcaacagtgatattagcattgccactatcatcagggcttatctttgcgccaccgtttacagtgatagttttaagcttaccagcgttgctaatttcagattcaagctgattctttaagctgtctgcatcagtctttaaaaataccgttgctttatcggctttaccgtccacagcgctttgcaaaccacttaagccactcacttgagtttgaagagccttaatagcgtcatttaaagtactgattgtaactttttgaccagcaataacagcttcgccaggctcatcattcatgtcataaattgcaatgactggtgaaccatctgctgctggtttaaaacttgcttcataagccgcttgagggctgtcactcttgacaaacgacagcttagtggcaagtttttgatttgcttgatccttagtgtagtggtctgtattaatatttccgtttgaatcaggttgaatattatctacagattttaccttaccagcttgttgtagtcttaaatcagtttcttccttagtgtagtaatttttaatggtgtcccctgtaacaaacttggaaaagtctaccttgtcaaactgttgtttcaaggaatccattgacactacagtatcagaaacttgcttacttacagtagtaagtttttggtcattttcactaatgctgtctttaagtggctgaacagtatcattgaaatctttaactgtggaagtcttccatgcgttgtagtctgcctgtaaatcagcaagtgctttagtcttatcatcgtttaactgttttaaagcagcatcacgttgatcagtaattgacttaacagctgcagttatgtcagcttgattactggttttaagattagctaattgctgatttgcagcgtcttgaattgatttagcttcagcagtccaatcactagataatttattgtatttaatagagtaatcagtaaaatcactgttaatcttagtaagtactgcttgtgcttgttgttgtgcattacttgaatctttattcaattgatcaatagtagcttgtgttttttgagtagcacctagcaggtggttttccatagcaataagactacttacataactatcattgataggcttaacagttggatcaactttaacttgaaaatagaaatcttgtgtagtatcaacaatagtgtcgccttgcttaatttgaaagaaacaagtgccactggctgtataacattggtgagtcatttgataactaaagtgtcctttagttcgatcaatcatgttgaatttaccactttgctcaccagtaccatcatcagcaactacacgatcactctctttgatttctgaaaatgaaacatccttatcagttaaatcatagggagaatcatcttcatttaaaattgttacgtccagcactaaacctttttcagtagaacgtaaaaccctcgtgtcgtctgacacgggggttattgatttatccgtttttaatgttatcggtcttagactcactctctttcaccttctttctgtgaatttcttgaagttgagtatttcttaaccttaaactttgattttctttttctagtttcgctattttaatggattggtttgcaataacagttcccaattcatttgctacaaattgttctaatgtattcatttttataaatcccaatacttacttggtcctcgccaatattgcttaatccatgaacctaatacaggttgatcactgcttgttacaacaacattcctaccaccaatctgtgcttgattaggtccaatgtgtgtaatagcaccactatttttatcatgaatatttactgatccagatcccaaattcaaagtataatttggagaatctaaactcaaaccaccaatttcctgactaggatttagtaaattagtggcatctccaaccgcaattgaaatgccatggttttcaacgtgtaaaacaccgttaatagttcccaaacttgtaattgtatcagtcttaatgtgtgatgcatccaaaatagggatatgagcttgatcaacaaagaaattgccagttacttcaccacttgaatcatcaataccaaacaaagcatgtggattgccataaatatcatggaaattaaaacctaagccattaaattccatataagaaccatcattgtttttagctctaattgccatgacgttattccaactggtagagccatcactggaaataggttcaagcattccgccaccaccagacttcagaaaattatcaaagttatctatgttagtaaccatttcctgcatgtggttagcaaaatctttaactgattcatcaagtactaaggtcttcttgccagctttatcagttttatagtgagcattacctaactttgccattaaggtctcccatgcttgagtttgggatgtaccttgcaaagtcatagcttcctgaacagcaccaataaaactatttgatctggcaatggcttgacgtgtggaagtgattttttcattagttctatcttcactagcttgaacaagtaggtgttcatagctagttggcaaatcacctaaagttacatttaaaaaaacgtgggctaaacagtcccacgttgtagctgtaacttcagctttttcagtaatttcataatcaggaaaactaacatccacatagtcataaagacttagttgagtaaagtcctgatcattatctgacatgtcttgataatcaagtgatgtttgaacttgcatatgaccatatctgtgttcaattagatagttcttaccaatttcagtagcttgatcaatatcagcttgtgtagcaacaaaactaccatcactttgctgaccgcttaaatcctgatcatcatgtttgaagtaaccactaatatcaacagtattaacgctatcaatgttaggatttacaccaaatccttcagcataaagtggaccaatcttaacagttacttccttattagattgatcaacatttgcgttgtagttggtgtcagtatcagcggaattatctgtatcagcatctgcagatgtaatatttgaatttttgtcatcaatatcatcttcacagagccatccattttttcctttgtaagttacttcaatgtaagtcttgccatcaccagattttgcttcatgaccattaacaacagtgaatgtctcaccattaggaattgaccagtttaaagcattcttactgtcaggagttgcataaatttcaaccttggaatgatctttaagttgattattaataaagtcatcaaaggaatgtggtttaactgaaccatctttagtgtagttaattgaactagattctacccagccatgactcgtgtgcatgtaggtcttaccgccttgagtaattgttttatcaatagtagacatcccttttttagcagtaactttgactttcttttgcttttcggcccagtaattagcatgtccgtaaactttatggcgtttcttgcctttaccagcccagtgccatgcatgtttgccactaccttttttaataacagtagtattgctagacaccattttatggtccttagtaaagtgatactttacagcgccatctttaacataaccataaccagagttgctgtattgacggtagctgtcttcttcagtaagtgataagtgtggtccatacagccattggtgtggtcctattctgtaccataaatcaccgtttgaattacgttcaaccatgtcatagtcaacaacagtaccatttttaacagtccagtcttgacctagtgacttaacaggatggtgatcaggaccaatttcaggtgaataaaatactctaattgattttcctttgccgtaagcaactacagcagagccatgaacagtaacacgagaacctacaccttcactatcaaacggattactgctcttaacagttaccgtcccactgacattgttaattgcataagcacctgatgtgtcaaaattgatccacttagaatcaatccagccaccgccatcactttgtgcaattggataccagctatcgctattaacagtgttaatttgatatttaccatcaggagtaaatgaaccatcattaacaatctgacctaagtgcagtttcatcccgttttgcaaagtaccaatgatcttttgaccatctacaggacaatcatagatattgatattgccgccagccatgtaagtgatacctactgaatcgtaagtgctttcccatgtagcccagccttgccaattatttttcgcaattgcttgacctggtacatacttagcgacaaataccgcaccagtatacatgttctgaatgttcttatcttgactaaaggtggttttgatatttttaccataggtaactttaataccagaatcacgtccaatacgttttgaatgtctgatattccaattatcaaaatcaaattcaccgccaaacagtcctaaaactgattgagtaacagtatcaccttcctgatcaggatcaataaacaaattacttgcctgctggccgccttgaatattcactttacttactttgttaacatcggaatagaaagtaaattctctctgctcctgcatttgattaaggatttgattgcctaaatcttgtgcagttgcgccgtttaattgaatatcatcagcaacagtagagttagcaagtaacgcactaatgtgttccgcttcaaccaccacattatctaattcgggagtaatgtggatgattttaaaccattgatgtacgtgcttaggatcacagtcttccataatccatttgttaggttggatttccttttggtgcaatcctgatcttggataagtcatagttaaagaccaaaactgattagaattgccattaacctgacaatcaattgcatcaggaagaggaataccgctactagtaaaatcactggcaatactgtcataaagatgtggcattgtcatcaaatcagagtagtcaccataatcaacttcaggaattgtacctacagttaatttcattagatcaacctcctccaatttggtttgtattcagctttagtgatagtagtgccagtttcagcagtaacagtgatagtattctgacccttccacaatttaggagtatcaaggttaggaaaatgagtttgtgtattgtatagattgccatctgcatcataagtatcaccagtagcaccattaagccaaaattcaccttccatattctcaaacgtgtaaggcaagccattgacgtacaaagtgaaactaccatttgcaatgaagtgccaatcaggaatagcagaccatttttcttcaccaactaccacaccgctatcaggcaatgggatataagcaattccatcaatacgatattggaaaggctgacaataaaacggtattgcacatacaccaacaaaatcactagttacatctttagtaacagtgaatggatctttaacaatagccttaaacacatatgttggatcagcagtgaatttaagatattgatatttcatccgcccatcaggatcagttggagcagagagccaatcagttacagaccgttcccaatcaaaccaaccacgttcaggtggtctaagaatttcaagattaaaggtttcagtcacattttggtaagattgattattttgtaagaaatcaccatttctaccttttatatgtgtaggatcaatgtcagctgttggatgaattaaatcccatggcttttgtacgaccatgccaaaatctgttgaagcatggtcttgaaaaatcagcttcacattatcatctaaatcttgcacttaatccccttctttctttaatcatgtcttgtctacggtcttgcttgtagaacggctcaactaactcccacagcttgcgaccttcaggagtttcaagtgtgatatgaatatcacggttttgagcgctcattttttgcaaaactaaaagcatggcttttaataagtcatgctcatctttttcatctttattagaaatacgttgttggttagcatttaaattactgttagctgtaagaatacctacagccttgccaattaactcccaagcacgagttgacttacttggaataagcggaacagccatttcaggtcctgcttcaccaaaaatacttggcgaacttgcaatacccccattagcataccagtgagtagaagtattaaccttgtgttcccatgcagctttagcagtaccataacgtccacggatatagtctttcatccatctcaattgagtaatagcattagttctccaatctctaccagcagatgccattttgcttgctggtaatgattgtggaataccataagcgccacttgatgggttagtaattctaggattccagtgagattcacctgggattccatttccaccatcaataatcaattccatataatgccaccaagattcaggaatgccggcttgttttaaccagtgtaagtgatcacctgtaggctttccacctataccatcttcattttctgacaagtgatcaccaatccaattaagagctttaccaccaagttcacgtttagctaaagctaacaaactaggtttaatcttaggttgatgcttagcttgatcgtgaagacctttaacacggtagtaaccatagcccatagacattgcatcagaaattctactgatacgtgcataaggtggggaggcattaaacattgtgcctttgcttggattgttgataataccaacgtgaccagctgcaccagtaccatgaccaaaaatgaccaaatcaccaggctctgttttagataagtttttacctaaatactgaacacctgatgattcctgcatagcaacagtagtacgaccaatgttaattccaaaatgtctaagtgcctgcattaccatacctgaacagtcagataaggtccttgacgcagcacccatttgatacttaacacggtcaaaagtatccttggcatattgcaagaacttagcacgtgaaccaccaccagagccaatggctttattgataaccgtccacatggcttgagaccatggattaccaaagtgagtaccagaacgtttactcaaatcagtagaatctttagttaaattagaaccaacatcatcaagattattggtaaacattgatttaaagctatcagcaaagtgctttaagctgttttctgctaactttctaagttctttcttgctaatgccagtaccatttgcaaagtgtggaagtgagagtgattgagtttgagtaccattaagaacaccccaaccttttctcaatagcatcctacgattattcccatgaggaataataatgtcattttgatcagttactacagcttcttgacgtggaccagattgagcatcattaacgactgctaaagtgtcatgagttaaacgaccatttgcatcagtacccttagcaaagtggactggattaataacagaactattaccaccaaattgctttaatacagcatcaataccacgaataccacggttgatttgtctgattgtgccacgcattgaatcagatgcataaccaaccattttatgcattgcaccgccaaaaccacgagcagtagcagtgcctaatttgattacaccatcgtgcaatctcttaacagattggtaagaccgtttataaagattactaaagtcttgttcagttgattttctgatcttatcagtagttttaccaacacttgaagtcattgacttgaaatctttaacagtcgctttagacatgctagagattttcttggtgaaattacctttgccttcgagtgacttaacagccttttcagcctgcctagaaatttgttcgccaaacttatcttttttagcagtcctagctaaaacattaagacgtttttcaacagtattaatgtttttgtgtaatgactttaattggctagtaccttttgtttttacactaacagtactctttttgcctttgatcttcttgattgccttagagagtgacttaacagatttaacacccttggtttttacagtaaccttatgagtgccacccttaatacgcttcatagccttttcaagggctttgatctgcttagatccttttaccttagcagttacagaaattgacttagaagataagcctttaagtgatgcactagaaacactaacgtttggtacagaaacacgacttgaaccagatgaatatgaacgtcttgctgtggatgttcttgtggatcttcttctagttgatttacgtttctttgttttgcgctttttagttttcttcttagttttaggagcagtagtaagtttcttaaagagtgcatcactgatccacttggacttgccaattcgactgttagcaccaagtaataatccttcatccacgagtgtttcaccgtggtgcggattagtcttagcaacggctttacggtctctactaatacgactggttaacttgtttaactgtacaatcaagccttgggtatttttaccacgctttagagcgtctctaatttctttagcgactttagctctatcagccttgtcatcttgttcatgcttaatcagacgcttacgctcattagcagtagaagcatcatttctgttatgacgttctttttgcttttgatgacgcacacggtcttcatcgtatttcttcttaagaagcttagtaagattaactaaaatcttagcagggctcttaccttcaagactatgtaaatcaacagtaccatttgcaaggtgaacagaacgaccaaacaatttagccatatcacgagcattgataacatcttgccatggaaagatccaacgtggtacattcacaccctgttgaacttccacagagccatcaggatttaaaatgccttccttattattagtagctggcgaatcatgaccatcatttaagatggctggataaccgtatttcttcttccaatcagtaccttcagctaagtgaacattgcctactttaaccttgccacctagcaatttaccaatgaacttaacagtactactgataccaccaaagaaatcatcccatgctttcttgatgccactgataataccaccaaaccatgaagtaattccatgccatgctgacttaaacagtcttactgatgcagagcctacatggccaaagaaatgagacattcctgaccatgcatgttgaacgcctttagcaataccgccaaaccatctagtaacagttctccaagttgctttgagtcccctagacattgcagaaccaagtctagtaaaccaagctgtcattgaatgccatgcattgcgtacgccacgagcaatgccgctaaaccagtgagacatgcctttccaagctgacttaagtcccttagccatgttcttgcctaagttactaaaccaatgagtcattccacgccatgctttttgcacagctttaccaacattaccaaaccatttcccaatgcctttccaagcatttttaaatgatttaactaagctgttcacccatttcctaaacttagaattgtgtttgtaaagtgaattaatagcaccagcaagcggacttacaaagtaaaaaccgacttctttccagtttttcttaaaccacttaatggtattgattacacccttagtaaatccattccacatgttatgtgcagaatagccgagattttcaagtgaccagaatttttttggcggtttgttcttttgccagcctttggtgaaattattgacagcttgaccaccccaacgtccagcatatttgccaagtaaagcaccaatgggagcgagcattggaccaactactggaatcatgctggttaatgtaccaccagcgacagcgccaacagcaccgccaatgtcttgacttctagcattagcattgtgacgatctttaacagcgttgatcacttcaggtgtagcaactgcagtacctgctaaagcaccagtagcaagacgcttacccatagagaatttagtagtagctttaattcctgctgaaatctttttgcctatttcttgaccaaacttttttgcaaaattaaagccagacttaattttgctccagctccatttgcctgcctttgctaagacatttcctgtagctctaaaacccttagctattgcttttccagcttttgtacctaaatcacttgctttagcccagcctttttcaatacctgtccaagctttgatgccagctttttctacagtagtccaagttttacttccaacttttctaaagccgctaaaagtcttggatagaacgccaccaaacttagcccaagctttttcacctttagtagcatctttagctaattcaattcctttgaaaccatcgtgtaatgctttaactgatttataagtagtaacagcacctttaccaatagaaaaaagaccatcactgactttacggatgcctttaattgctaccattgcaattatggcatcagatatagccttaacagcagtcttatttttagctaaatcacctgtagcagtagcaagtgtatgtaatgcactaccagaatccttgccattgcctttaacaataccaagtgctttaccaatgttttgaataatagctgcaaagtctttccaaactgccttaccaacttccacgcctagagagataacatttttagtgatagctacaatatcacctttatgcttatctaagtagccaataacgtttgatactgctttacccagctggtcagcaccgctcataacttctttactagtcatgatattcttcaaggcttgcaagccactagtcttagcatcaaagattggcttagtaaattcctgttctagtttttgtctagcaacagtcatagcttttaaagcaccagcttgactttgaccataacctttaaagctttcatcagcatacttagatgatttagcaatccaagtttggaattgcttttgtgttacattgccagtttttaaaagtgctctaagtttagattctgacataccagcaccatgtgcaagtgtagccatgaatgttggagcagctttggtaatacggctcaaggaggaataagtaactttaccagtactaccaattctttgcagtcctgcagacatttggtcaatttgctgaccagtcatcttagaactatcacctacaccagcaatggttttagccatttgcatagcacctttaaagccaatggttgaccagttaagcatatgagcttgcaagtttgatgctgaatcaccagctaagtcagtattggactttaactcaccgatctgcttatcaagggcttgaatttgtctggtattcatacccatgcctttgaacctaccgttgatcttagcaattgctaaattcaagttcataccctctgtgtaagcagacttaaggcttgatcctaagttagaaacagcatttgaaacagcgttaccaagtgcagatcccatgaagacctctttcaaggttctatgagtttcttgactttctttattaacactagaaatcttagcttttaatctatcccatggtgtaggattgattttcttttgttctgcttcaagaccactaatagcagatttcgctttatttaatgaagtcgctgtttcattcactctgatctgttgacgcttgtaagcttcactagttgcaccagattcagatgcaatacgttttaattcacgtgattgaatttcatactgcttagttaaattactgatcgaacttctataacctgaaattctagcttcattagctttataatgattgccttcagattccaaacgatcaacatacgattttgaaacagccgtagtggtttttaaagtcttttgagcttctgctaatcctgacttgtagtaagtgagagagtttttagccttatcctgttgcttagtcagtgattctaatctactagtagctttcaaagtttgagtagcattcttttgaagtgcagtactgatactttcataagcttttttgcccttatctgtagaagtatcaatttcttcttgctgtttctttaaagatttttgcttttcaactaagccatcaattaatctacgctgactttttacagcatcagataagcctttgtacttagcttcagccgcttcagtagtcttaccagcacttcttaaaacagcttcttgagctttccatgcactggtagtactagatacagcttgccttaattctcgtaacgtttttacaggctgatcaccgtttaatttaatatctgtaatcagtgtaccaactggtattcttcctgccatttatttacctcctttctgttttgtctaaacttgctgcaaagtcccaaagactcattggacgtttgtcctttggtcttgcactcattacttccacaagacggtaataatcagtgttttcataatcttctagggacatatgagcattaacaatcatttgttgttcttgataatcaaaatcttccagcatttcctcataggcatgtactggatcaggatcattaatcgttgtcgcttttggagtcgtctacttgtaagatttttccaattaaatcagtaacaaattcacttacatcttctggagcagaatcttcaatcttatctacttgtgcatctgataaatgcaaaatcttcttcaaaaacttttcttcttcatccaaaagattttcttgtgctgttaaaacatcaagaattgattggtcatcatcgtctttaaccttattaattgcaattgataattttgcaaaaaccttttgtgcctttaaacatgcacgtacgttttttacagttgtttcaacttcaaaagtagttaaatgaagctttttaccattgatttttactaacattgattgattttcctttcaaaaaaagaaaaagaacggctttcacaccgttcttaacaaaattatttatattaatttgccaccgctacccaccctactaattaattattagtgagtgcctgttgaagtagtttgatctttctttagatcaccagtaccaccttggtcagcactcttgtgagttggatcttcagtacctgaaccagcaacagtacctgaaataatccaatcaagcatcttgtcaaagttaaatccatcttcatctgaatagaatttttcgtaaactaaaccatctgatggacgtgcagcggcattaagagtgaatgtatcgtgtaccaaagttgggttttcagtatcagtacccatagttaagtcaacaccaggagtcaagttaccgtatggcaatgcaaagtaaagatcaacgccaacgtttgagttgtatgagtgagcaataacaccaccatatgcaagtggagtactatctttagccatgttaccaaagcctaacttgctatccttttcaagacctacgattgcatcatagaagttatgtggaatgtcgttagcaccgaaagtaccagtaatttgatatgcaccaaagtgttgttcagcctttgcgttagaaccgtaaacagcttgtgcagttcttgaaagaccagtgatgttagcttgagtagcacctttactggattccaaatcaattttaaatacaccatctttaccaatgttggtggtcaaaccgccctttgattcatcggtaacaagcttaccgtccttatcgaacttgaaaacaagtaaatcatttaaaccttgaagttccatgtaattctcctttttatctgaaagctaattgttggttcaccagaattggggtcgtatgtgtgacctgcaaaactagctacaatttgccaaccattagctacaaaaaaagacatgagcgagtgttcaaaatcgttcatgtctactgttgtttttttactataaaaaacgtttatcgctaaacgttgtatctgttccgtgtattggttactgcctgattcatcaaaatcaaaatccacttcactaacgagtacatccacagattcacgtggtgtacgttcgctagttccaaccgcaaaagagtaggctttatgcaatttgggaaaattggaagaattaagaagatcaactacctgctttgcaacagtagtcatttatctaatatctccctaaatttttcagcattagcttttagtactgcatctgcagcttctttttctgcatggtctttaaaatgtagatttgatatttctttttgagacatatcacgtgttccatcattaacaaaccgtgcgactaatgcattatatttatcttcccaacctacagatgtatcaccagtttgaccatcattgatttcataaccagccttataagtaatggcatctctcatgtgcttagacttacgaccatgaccagctgaccttgcatgtgcatagcttgcatgagactttggagtattctttttaagaacttcagcgtaagtcttagcaccttcaccagtgatttctgctttttgattggtagatagattaactttcttagtaattttatctagccaatcatttaagcctttatctaaatcaaccatcacgatcagtcactcgtgtgagagtgatcaaatctcctgcagttggattttgaaatggatcaggattaatatcactcacttcataaagcttattgttaagcattgcatgagtgataccatcataatcacgtttgtgatgaataactacaataaatgaatcatcacgatgatgccctttattttgaactatttgaccagtagttaatccccaatgtccacatagtgtaggttttgcgagtcgtttaaactcatttgttggaagaccgttatcatcttcagtatcatcaacagtaccaaacacaattttatgaattagtctgtcccagctctgaagttgcaccatcgtcattcaccacctttgattcatcataagtcccacggagttgacctatgatttgttttgctgtagttgatgacacagcagcagagggatgcaaaaaccagttagttgcaattgcattaacagctagcttatacagctcaaacactgaatcatctttgtaaaaactatcatcagcatcttcaccaattgcaccctgaacgtaattttcagcacctttcagtgttgcttccatacgttcttcatctgaagaatccaatgcatcatcatcaggcaagtaaccaagtgagcgcttaagcccatcatcaatttttaaataagtggtcattattgatcacctactttctactacttacctgaatcagtgcttgttggtgcagtaactgcttgcataagcattggttggctttcaaccttatcaaatgaacctgaaatcatcgcctcatcatcccaaatcttggtatcaaatctgttcaatgcacggatcgcagtttggttacgtctaaatgccttatcagcaatgttagaagtaagcaatgacatttgttgacggtcgtacatgtgaataaattccttaaagttaccaaagtaaaatggatggctttgatacttgccaccaacagtagtgttgttagaaaggtatctgtcttcaaccacacgaacgttaatgtattgcataccatccatgttgaaggtggtttgttgagtacgtggatcaacgttcatggcacgtgaaccgtctgacatacgaaccttagctaaggtcaagaaaccagacttgttagttaacaaggtagcgccaccccataaagccatatccaattcacctaatgcatcaataatgtcatcaagcttagtgatagtagccttcttttgtgagttaggaagtaaaccaacaatctttgagttataggtaacaacattcttacgtgcaatgtgttggtttaaccatgcttcaatatttgcgtttgagtcattgattaaatcatttggagcaaagaatacatcaccataatcatgaatgttatagctaagttgcttaactgatgggtaattgccttccttaatgtccttatcttgccacttatagtctgaattattagttgaatcatcaggaatatcatccaattgatccattggaataatttcagagaatggttcaatgtttctagtaccgtgatcagtaccaacattttcaatagttactaaatcacgcaagtcatcatattgacgcatcaaagtgttaatttgagtttgttgatcatcaggaatagtcaaaccagcattgccatcagcagttgaacttgatgataagttttccatgtacttcattgggtttctaagcatatccttgaaacctgaagcaatgttcttcgacttttcttcagtcttattttcaacaggcttattagcaggcttgttaaccttttgagcttctacagcatcgtcatagttttgcttagcaaaatcacgagcttgaacagctttgttataattttcagccgtcttcttcatatcttcagcagaaacagattcaggatcagcttcataattcttttgtaaagctaccttcttattaaagagatcagtaaccttattacctgcttcaatccaagcattttgtaattcttgtaaattcatacgttctcttctttctattgccataacaaaagggacaagtcttttttgacttgtcccttatctgtatcttgtttattctcaatgggtttagagtcatcatcggacttttcatgaattaatgttttaatcttattaattgcaccgctacttaaaacaggcactccataagcattaacaaccgctggtgcttgatcattttcaaacataatagaatcagcaaaacctttatctaccgcttgtttagcattcatccaagtagttgcacacatcatacggtaaatttcttgtttatctaaaccagttcgcttgctgtaaagatcaacataggtttgatccattgaatctaatgattgtaatgcactagtaagatcatctacattaccttcaacaccaacgcttactctatgaatcatcatttgagcggttggtgacatttcaactttatcagccgctaatgcaatccatgaagcagcagagcaagcttgaccaactacttgagcagttacattgcctggatatttctttaaagctgtatacatttcagaaccagcatcaatgtaaccaccaggtgagttgatttccaatataacgtcttgaccattagcattactcaacgcttcatttaattgattaggactagccacttcataccctaaaaatgaataaatatcacctaaattattgggtacgattattcccttgattggtactgtcgtcatcatcttcacctccttcatttgctggaataattgacttatcaggaataggtaaatcattaggcaaataaccatagtgctgtaatacatagcgcccttgattgcctgacaaaattcctttacttgataaatcaccaatttcagatgcaaagttatcaccagttgcatcaatagctggtctcacatcataggtaatttggctgttcaatttattggatagttcactttgaactgcaccagcataacgattaatagccttagcatattgaccaccaatttgagtgatgttactttgttggtcaccttgaccattaatataagaatcaggaacaccatagactttggcaatttgcttaccagtccaatctgcttgttgcagtagttttgctacatcgcttttcacttccaacggttgataggtctctaaatcatctaaaacgatcggaccattatcagagttattaacttgacgcataaattcacgtgatctagctgacttctttttccaatcaagcagaccgccaccagtaacacttaaaattcctggtgcttccacagattgagaaagagcatggagtgttaaacgattgcttgcatctttgatatttagttcattagctaaaccagtaagtggtgaaacaccagtcttaccaccattctttgatacaagtctgatgtggatcacatcgctttgtggtacgttctcctttgtttgaatatcaggttcatcaaaattaatgttgtaggttaatcctgatccgtcctctaagagcatcacttgaacttgagacggtcttaaaaactcccaatataaatcaacgccattgatatttctccatctgtaggcataagcattgccatctaatagcagttgtgcaaacatcccttgccaaaaactaaagccattagttaaattagaaggattatcaatcagtgattgtgctctatctttatcagctttcatttttaccagtgctaaatcagctgataattgtgagatcaatgagaaaatatctgaattttttaaagcagtatctgcggaaacatactcactaacagataaatcattcttaaataaagtaataaattcaggatcatttaagctgtagcctgatacattgcttttatttaaattaaaaacaggcattatctatcacctcctccctgaccatgtgggagtagatcaattaataagcctgttaaaagtaaagcaattcctagacctgcaaaacctgctattttattccataaaaaaagagctatgacaataaagccaaagcccaataaataaaggattacatctaagaatttccaaattttttcaaacagcgttttaattatcacccgtttcacctcccaaaagaccagaatcaggattttcaaaccatttaagcacttgttcttgtgtcatccgttctacttgatgtgatttgtcattgatcaatccataatcttcaaagttgtacattccttgatacattgcatcaatttcagcatccacaacatcaatcttcttagtagccttgtccttatcaacttgaataccaatcttgtcttccctaataacagcatttaagagagccgtttcttcgattggatcatcaaatcgtgtaatttttccagtagcgtaagcttcttgcaagaatttagttggattagcaagttctgaagttcgttgtgcaatatcttgaatcaaccaacctgtatttgcattaaggctttcagtaatatttttaacttgataactaccataccggtcatagccaaaaaacttaacatctagtctatgcttttcagtaaattcaagaatccatttataaacttgttcgggattgataatgcctttttcatgactagtaattgtgcagtaaccttttttagctaattcacgataaggcaagccatcttgtttttccttagcttcaatacttcctgcttgttgccatggaataaatgaatgttgcatcatttgccacttatgcatcccttcaggagtggtatacggaaaagcaaaaccaacagctgtattatcagaaaacattgagtagtcaaaacccatataacaaattaagccatcgatcttgaaatcatcattgatagctttttcaacgtctttcaaattcaaatagctagcagttgattgtttaagccacaaattcaagttcttattctggaacttatgaagcgtattagtaagcattccttgatcacgttgcttaattaaattgtcagttctacgcttgcgttcttcatctgataaaccaattaatggattagatttttcccatgtttcaggcttgaaagtttcatcaaggtcatcttgcgcccacacgagacagagagagttatcaccttcacggctataatctttttccatgatgtgctgcatcgtaatttgttcttgatgaaacggacttgttggatcaggataagcagaactaattttgatgaattgatgatatggaattacttgtgcttgaccatctgtaatatcagtcattctatcatatgtatcaagagcaccggtttcatcatagatagctaaaacattgtgggttgaatcgtatttatcagcttcataactgattttccataccttattgttagtttctttttcaatgatttggttagtctgtaaatcaagccctgactctttagctatggatgcaaacggttcaatcttaatgactgcttcaagcattttcttaacataaccaaacaactttgttgattgatcagatgtattagcagtaatcaagaagtccttgttagtgaagttaagcgtatcaatcaagacagccttgcacatttggataccagctatttgtgttttgccttgtccacgtccaacacttatgtggatgtcagtgtatcttctttcaccgtttgcatctttccagccattaatcatagctagaataaatttttgccaatccattaatggaagtggtttatgtaaatcaacgtctggaatgattgatgcaaacttaaaagtattttgtacttctttaacatcataatggtaaggaaaatcagatgtattttgacgtttcaagtcttgtaagtttctgaaacaagcaagcttagtaatataaccagctaatcttttaccatctaatacatcaaaacaatattttgtggcatcatcattgtatttaattctaatgtcgttatagttaattgcctgataagcaccatcaacgtcatgagtttgtgttaaatcaattttcattgcatcaatcacctcttttttactatttttaggcaaaataataggcttaatcacaaaaaaacgtgattaagccctaaaaattatccttgcatttctcttaatgcatccgtggcaactttagatacgttaattttattttctttcgcccaatcatttaaagcttctggaatagaaatatttcttcttacagttttaccatattgattgagccactttgtcatgttgaccgtaacccatgttacttgttggttatcttttaatttccattctttaggattttgaactttaggatatttttcttcaccatctaacattgcagccattgcatcttcagcatgtactaatgcttctggaatagtttcaccatcagttaccataccttgaatattaggtgaagttacaacataataatgacctgattcatcattatattcactaagaattgcaggataagctacgatattttgcttcatattttatgatatgccaaagctaggaggcttaacctcctggcttttctaatccagcctgttcaagaatggctttttcagtcatttttttaagttctttgctgtgcattggaacttctgtttttcttccagtagttggattaaaaaatcttctatgaccaccttttttaggtaattcaataaaaccattcttctttaaaaaacgaaccattttagctggcttccaaggcatatctttcacctcctttcaatttctaagtatattatacacaattatttgtgtataatcaacaaaacctaaaataaattaatcacttaaaaaaatctttcaagctttgaacagctgtttttttatcatctgtagtaggtaaatttaaatccatcatttgacttcttgctttaggacttaatcctaattctttaccaatggtattcatctgtttcaacgaatcagacatgatctgataagctggatttttcttgtatcctaaaaaattcttagcaacttccttgccatccacaggagagacgaccgttttatagattggttgctgaacaccatgttcaaggacttcttcataagccatgcggtaggtgtcgtaggctgaacagtattgttgaagtaaatattcatcagcacgtaagattttgtcattcttattgagataagtggcaagttttggatacaaatatttgccgtaagttccaagccatttaggtgcttgattaggtactttcggctttgatagatcaactttgttcatgtttcagccccctttcaaaaacttttaaaattttgtttgtgacacaagaaaacggcactgatgcggctccctagacgttaaaaaaacggggcgggggtctttttatttttgattcatgtataattacacttacaaaatttaaatctcttagaagcgaatttttagccatttacagcgtgatcatttttcaatctagccgccaagttagcaatcaattttacgtccgttattggcggattatctgttggtttaccatgaagtcctgtgccataatattgctcttcaaaacgtgttttccagtagtggcatcttccacagctggtgaccatgttctgaagattcttcatttcttctggatacctttcaactggtagtacgtgatctacaatgttaccttcatttaattgacctctagccttgcagtactggcatagatggtaatcacgtttaaaaactattgctcgcatctcacgccattgcttcgaatgatagaatttgttttgctctgtcttgaccggattacgatagcgagtgatgtgattgtatcgccattgcgactgcttgctgcgtttatgatgcaagcgataaaactcattgcgttcttgcaattctttttcgtgttcaatgtgtttcttgcaataatgatttggcatcatcgcaaactcatgacagtttggaaaacgacatctgcgaactcgtggcattgactggctcctttcatttgataaacacaagcactagggcttgaacctagattaatagttttggagactattgtgctagccattgcactatgcttgcaaaagaaaaacacctggaaaatattcttccaagtgtttattaatcatgttgtacttaaatgtctatttagttgtcaattgaatgcagacaacaacatgaagaaaactaagattgttgtgttatgacatcggacctttttctttactatccgacaatacatattgtgccatgtttcaatccgcatgaagttcactgtttgtccagtgattgtccactaaaagttcactggcaaggtaaaaaataaataagctaaattgcatcagctttcacatatacatgcagatcaatatgatctgcaggttcaacatcacattcatcttgccaatgatcataaagatctgcaaactcattaagtgcgattggtttaagtactttataatagtaggtcttttcatagggtagctgcataattaattgctcttgagggatgtacttaatatagttacctattaatattagcttactattatctgagcagttaataatcgtttggcatattgcgtcaacaaccttctcaatgctaaaagaattaaccatcattctctcttgtccatcagtgcgattactatgacttgaagcgctagacaattgaggactagacaaatcagttaaactacgtccacatcgcctagctaatctaggaagtttatattttaataacttatcaacacggttagcagtcttatcaaaatctacatcagaccaaatattcacaacaatcaactccatataataggtaagaataacaattactaatacatctattataagctataccaagcatttatgctttagagttcatataagaatcaagcccatttttaatatacagatttgatgaattcttcacgcaataatatgagttatccataacattcatccaaatgattttgccagttcgaacagcatatccctgtttaagaaaatgtattttcgcataattattattagcaattttctttttaaaaataattttatataaatgtattaaagtgtcagcataataagtagttgaatgatcaggtgctacaactttatagtaaaaaatctgttttggtttaatactatgcttttcgaaataagaattaatcgtagcttgaccgtgatgagtaacttgtgcaatatgtgcgtttgaatagccaagataattaagctcttcagtacgagcatagtttttgtcttcagattgacgtcccatcggcaaaagtctatggatttcttgcattttaggattagattcaggtaccttagaaattgatccaaaccgatcttctaatttatgaattattactaaagcacgttgataattagttaattccatattagtcactcgcatcgatatacttcttaattgctttagtagcaatgactgacattggttcgttcattcgttgacaataatcttttaattgatcgtaagtataagcgtcaattgttacttccatacaatcacctcttctattcatatccatagccaactaaaccattctccacaatcttaagtgcatcattagtatttcgtgcaattccatgaataacattgaatttcatcaacattttatggaaagctatttgatcaggacgcggtttaccagtagcatttttcacttcaatgtaaaaagcttgatgatcccaatcacgccagccatgcaagtcaggatagccagacggcaagcctgtagtaaaaaatctaccatcaggcgttctaattttaccgacattagcacggaatatatgacaatgatgttgtgagacaactaattcaattttcttttgtatactatgttcactttccattgataaacccttccgtgttgaaaattgcgtctgattcattaggcaatttcatcagtaatttcatgtcatccatacttgcatgttttttctgtaagattaactgtgatgctttaagtgggtagaaatcgcctaaaaagtcatcaccccaaacaccattttttcgataaggaaaaaagtactcattagcgacttcatcataaagtaatgaatctggataaatttttcgtccattcttgtcatgaaaaatagcctttttattatttaacatagttgttgtcctccaggttatgaattctttttgcaagaattacaattgattcccacataaaattatcttgtgcagtagctttatgttgcacagcttcagttaattttttatttgcttgaacttcttccaataaagaatcaaataaatcattacttttatgaatttctttcataagatcgttgttagacttcatggttttataatctgaaaacaaattcagtacacttatcgtagggtaaagaattgcaaataatacaagcagtgcagttttcattacttgtcatccctaactagcattggcttattatccttgttttcttcaggaataagttcctgttgatcagcctcaagacttacttgaactccattgccatcaaaagcaatgtcttttaacttgtttaagttaatcttatgagtaagcaggtctgcatctaattgcaaaactactttattaccattaactttgaaattatttgttgttgcttgaaatttaattgtttttcctgtcatgtttattatctcctgttaactaagcattaaatatgtaaacgatatactggtccaaataaacataaggaaatctaatttttcatttttaaaacaaaaagaaattaagactattaaccagttcattaaaattaatgttaaattgaaatattgttttgctgtcatttataaccaatcagttacttcatattttgcattctcatccaattttcgcccacaatttggacaatacttaataggataaggcaagcctttaatcgttaagtaccacttgccatccatttcatttagattaacgtgaaatctattcatttttggcgcatataaatccggtccatcgtgaaaagcatttaatgtactgcaaagatagcagctacttgaaactgatgtcattcgtcttcaactcttttcattagttccttcggtggtcgattatatgtaacatgttcacattttgtacaaatataatagtcgctaaggctaaacagcgatgttttatatacataactgtgatgacaaaataattgcttaaaaaatagtttcactctgtaaaataaactaataatcatttatctaatctcctaccacacatagaacaaaatttgatttttttatcaagtttaaaggaaaagtcatcataataatcaataagaaccacttctagtgaattatcttttctgataaataattcacagccatctgtataaaaagttttcatcggatcctctgatccactttcaaaatgacaatatggacagatgcttttttttgaaactgcattcatttttaattttcactttctagctttctcccacacataggacaatagttaatcttgctactctttgatacataagtaacttcgacatcacaagataaatttaattcatttccattaatataaacatctccattttcatatctatcaatacctgtgtacccatcttcgtatgtatcttcaattgaaataattgatttttcattattacagtaatcgcacataattattcctccgttaatcagtaatcacaatgtatgcattcactttttcagcgtggttataactattctttaagtccctagccgcttctttaggtgagtcaaataatccttcccaagtttttgcttcattgtcactactactgtgtatagttacaacaatacaacgatcttgttcataataactatcataaaaagtcgagattctaaacagattatattcatctggatcattatcccaacacattaaaatatcgccatacttgtaatcctcattagttttcttcgttcttttatcaattactttcattgccatactcctttatgtactcctgaggcaacataccatattcattaaagaactcaccacatagagcaagatctgatcttacacagtaatctgtagccattatgtgtctagcttcttcaagacccaatttaatatcacgtccgttttcatctttcattttcatgctcctttaatcaatagttatcgttagcaaactatatctagcaatgtccatatctccgcaataagggcaatgtttaatatcatcaatttcagcaataataaattctctgccgcaatgttcacaatggtattcagctaaattatgattgttcattttgatgttctttctttaaattgcgtccacaccagggacaattacctataaagattttgtcagtttcctgagaatagcactcaggatcaggatgagaaataattaaagctggatgatttttacaatcgatgtaagtaaacattattccgtcttcaccattcaccttattaatctcatctggatcaacatagtcatctctgtagtagtcgcgtcctagctttgtctttgggttgatttcacaatatttacacaaatttaaatattctttcctctcaagtgacttccacactgatgaagtgtagtgaattaactgataccgtcacaaaaaatatcagcggtgagtttttgtatagcattgctaattggtaaataccgatatgacatcttttgccaatttgtcacctatttttcttagcactcaatatagtagactgctaatcgtggtgggttggctaaaaatgtgaccagtttgtggtgagtttgtggtgggtcttacgcctacagcctgtagtgttgtgaaactgtcaaatcttttgtgtaaatagttctttctcgtaaattgattttttaatcatttatttaatcaaaataggattctaaggtatcctgaacctgaccaaagcctttatgaattcggttgaaatagcggtcattgtagctcattgcctggatgccaataaatgcatcaagcgactgttcagttggaaactctgccttaggcttagctttacgcttgatgacgttgttaaaggattcaatcatattggttgaataaattgaagctctgatttgtttgggataattgtagaagaccagcagatcgggctcaatttccttcaaacctttgatgacattgctataagctttattccatctggcatagaatttgtgcaagacagctgcagcttcttttttgcttgtctgttgatgtatctgcttgaattcgttcatgatcttttcgcggtcatccacccggactttagcacagatattgcgcatgacatgaaccaggcagcgttgaaaatgagctttaggataagtcctggccaaggctgttttcatgccaacaacaccatcagaaagaaagagttcaacttgcttcaagcctctggacttcatgttttgaagcatctctgtccagacttcaatgttctcactaggagcaatgcagtagtcaatgacttccttatgtccattaggtttaatgccaatggcaatatatactgcttcacgctcaaacgtttctcggcgcaaaggaaggtatgtcgcatccaaatagacgcagaaaaacttgtcgcttagcttgcgtttgtggtaagcctcaaccttggggagcatctgcttggaaatatttgatacttgagctggactataatgactgccatacattttctcaatcaagtcagcgatttctctggtggttacgcctttggagtagagcttgataatcgtgctttccaaaacatcagagtgctgcttgtagtcaggcagcgtgtgctgatgaaactgaccgttgcggtctcgaggcacttgcacttcaattggtccaaactgggtatcaaccttgcggaaataagcaccatttctagaattgccagtattccagccatttctggcatagggatcatagcctagaaaggcagtcaattcagcttctagcaagttattaacagcctgttgtagctctttgcgcaataaatcatttattttgtctggattgaatagagcttgagcaaaatctttggtaaaatcattcatgaaggagttcttctttctgtatgtgttttttttgttcaaaccaatcatacgagaaaggaactcctttttctaatgtttaaagaaataaatttaaggaatcattcatccttacacaaactattttacagtctcagtgttgtggttagtgttactacttttttctttaaaaagtaaattataaaaaagaaaataaatataataatataggcttttaaactaaccacactaaccgaaacacgtcacacccctacagcccaaacggtttgagctaccacatatactcaccacaaccaaccacaactaaccgcaactaatcacagccattaattccaatcaaaatgaagtggttctttctttaattggatgcctacatagcgagttccatttctttctttggttttaggcaatttcttagccatttctctaccaaatttagtcatagacatcaaatgttcattagattctctagcccaatcacgatatgcattgtataaaggtctacccatgatagtgtaattgctaccagctttacagcattcatcaagaaatgcttcaagtggatccatgttttcacggtattgcttggatgcatcttgaacaacttcagggtctttcaagccttctacttgccacatgattgcgccttgaacgatccaatttaagattccagtccattcagcttttaacttgttttccaaattcttatcaactttgttagctggaatttgtacattgaatggaacaaccttaattcttctccaaataccttcatcagttcctctaatgaatggcaagtggttagtagccatccaaatcttgaatttaggatcatattcaaattcttgaccatataaaaatctagctaggattctatctccaccagttaattgcttaactaacgattcatctaaacgtgaaccttcattagcttcagaactggtaactaaacgtgtattttcaagtcgtgcaatatcactattagcacttccgcttgaattgtggacgatgattgactcaactgacatctgctttgcataactaccaagaatatttctgatagtattgataaatacagatttaccgtttctaccagtaccaagtagcaagaaaaatacttgttcagcagtcgatcctgtaattgagtagccaacagctttttggatataatgaatcaatttctcatcatgattgaaaatttgttctaggaagtctttccacataggacaatcaatattgtctgaatattctgatgcggtttgttcactaaacatctttttaatatcatgatctttcaattcaccgttagttaaatcaacataaccagattcagtgtttagaagcatgttgtcatgatcaaatacaccgtgatcaatagttacgtacttcttaaactcctcaatcatgtgtatttttgccatatgggaacgtgattctttaatgaacttattccattctttcattgctttatctttatcctgctgagtagcaaagctgaaatcaggattttcagttttaatcaaattaacaactttttcagctgctaactcaatatgccgtccattatctaattcccaatatgagccattatagaaataccaagttttatcagctgccatatatctgaatacatcaccgaactgatcatttaatctaagtcctcttcctgtatcatcccatgaacgagcaacagcccgttttttaggtttgttccagttaaagactagatctggctctttcccatcttgctcaggattataaatattaacggcttcactgattgctttatttaaaagggatattccataagtagtagcaccacgtttttcatcatatttatctctcattaaactggaattacgaaaaatcgtatccattttgtggaagtctctaccagtccaaaatgcaaggtcattagcaaatgccatatctgcttcagagtgagaattatagaattgttcccagccgcccttcatgaacatggtaaagcgagtaccagtcttagatttttctgcacgttggatgatgtcaggaatagataaatctagcgctgtaatttcaggttcttcaatcttatccggcactgatttatcagcaccaaataagaaattataaagagcttgcatcttttcttttgaaagagtgacaatcttaggaataccaatactgttcccagttagtgcaaagaaacgcccttgttggtacatctcataattgcctttacgtctgcgattgcctggaatctctcccttaaaaatacagtgaatacctgtaccagattggctgacttccatataagtttcatcagtcattaaacggaatttgtttatcagattgctaacagaactatcaccttgatgccaatctgctaaatcatctgaaatatgatcaatatcaagccctacatatccgttagtaaaatagaatgccaagccatcagcacgttcaatttcatctaatgcttttagtgctgtattaaaatctgaccatgtactaggatcattagatttaccagctctaccgttataaggatcaataggaatcttggtatttttattccgctcctttacccatttaagttgaaacaatccccattgctttaaacttcgcaattcttgagggatgttttcataggtaaattttcccatttacttcactccttagaatggaatatcattttcggataattcatctgttgaacctgtattacctttaaatggatcttctacagtttcttgctttttagcagcttgtggtgggaacttagtcttttgccatgaattagtgaaggtactattttgtttgcgagtttcacctttgtaagtattctcacctactgaaatgtagattctaatgaattttccttcacatgctttcatcaaatcttcttttgacttgatgtatttatcaatttgagcttgagttaaaccaattgcatctgcaatatttgccaaatctgctggatcatatgagcctgaatcttgaccggtttctttatccttagcagtccaaacatttgcaaagaagtggcgaccatgtgtttttgcattagtattagctaatgcagaaactttgtctaagtctttacgaactagaaaatcaaattgcatattttcatgaccgctagggcttgcatcaccatggacgcttacaatttgcatttcataagttccctttggaaatagttcacttctgttgtttgtcttttcgtttaaattaataaaacccataattaaataaatcctttccttttagccatgtgccaagcccaaccattcttataatgttttgcctttgcatacatggttaattctttaaaactggttagttcactaacctttttctttgctattagatcaatatggaatttttctgctttaatagctcttaattcttgatctttcttttgtttaatttttctaatttcaattgaaaaatcatgaccgcagatagggcatttcacacattctgctttaataactgcaaaacaatcaggacatgttttaatctgtaatccttcagtactaccgctatctttgcgtggatgtttctcacgatcttccaaagtccacttgtaatcagtatcaggcaaaccaaacctttcaaagttaccaacttgatcaataatgattgcgtgtttgttaggttgatacctcatggctctcattgattgctgtaagtaaattactaggctttgtgttggtcttaatagaactacacatgaacagtcaggaacattaaagccttcacttactagatcaacattgcataatattttgatcttgccttctttgaaatcaaccattatcttgtcacgtttactttcaggagttttagcatctgcatgaactgcatttatacctgcatccctaaaagactgtgctacttccttactaaagctggtagaatggcaatagataatagttttacggtctttagcaaacttgagccatgattttacaatgtcaccatgtataattgacttagtgtaattgtttaaagatttttttgtataatctcctgtcgatccactttttaacgttgatttatcacctaactggtaaccatagactgtaaatggtgccagttttttattttcaattaaccatttagcagttgggcctaataccatagctgaataaatatctttaaatcctttaccagataaacgccatggtgaaccggtaaaaccaagccttggaacatcagaataataattaaatattttctgatatgttttagctcttgagtgttgtgattcatcaacaatgattaaatctggtttggctaaaatatttaatctatttgctactttacctaccgtgagaatggtgcaatggtttaaatcgacaccctgctgtttaaaagaatctttgatctgctttactagttcttggcgatggacaaagaataatacatggccacctttttttactgttaatttagcaatttcactgattactactgacttacctgatcctggagggctaacaattaaaacgccttgatttccagctgctagagcatttctagccttatcaattaaatcttgctgataatcaaataattgaaacatttaatcatcttgcttattaattttctgcatcatcttgataaaatcactggcatttctggtatgatcattttcttgatcaatctctcgttgaatatctctaacgagaccagataatacaatgccatgaccatgatgcattcgaatttcatttccatcatcatctaaaccaatgataataaaatgcttgatttcgttattagtaatcttcaaacaagtttctgcaactttgtcttccatttcctggtttagctttaagtcttcatttacatttttgttaaacattattgtttctcctttgcattttctttaactttatcgaccgctttttctaaatccgacttttcaaatttgaaaaagtcttctgctttgctgccttttcgctcgtctaagcggtttttagcataggtatctatacttccctgcatgattaacccacgctcacctgactgtggtttttggatcatacgggcaaccacatcacagctacccattaaataatcccgtggattatctctgatatctggaccatattgcgtaaattcttgaccacttggatcagtaatttggtactttgcttcccaagccgtaactaagatattgatgttccatttaaaaacgctagcgataaatctaattaaatatgtattccattcattataatcagaaatcttgttagctaatcctgttttggttcctttagccttttcgacaaaaaacaacttctgcagactactgatattatcgacaactaggttgtcatattgactaggatcaaaaaaatcataaaagtcatttaagtcttcgattggttggtctggatccagaacccaaatatcatcgttaccttgccaaaatctcactctttcaaagcttttatctaagctaagcaagtaactttttcctttaagatatttactcaatgttgttttaccaacaccagcaataccgtagacaagccatctataattaggctttctattttcactccatttaaatgctggcattattcttcacctgcatcgcgaatcaaatttttaatgccctgaagctgattaaggacattgctagtaattgctttttcatatgcttggatcattactttcttgaatgcttcccactcatcagtatttttaattgcttgaaaagcttgtcttgcttcggatgaattaaattctgcattttcccatctagcagcaaactttaacttcgcttcttgcttaatgctatcttttaaccaatcttgatcaatcatcgttatctacctctttatctaaaccttcattacggaccttaattactgcttcttcataaattgatcgaaccacatttgctacaacctcacttgggctagcagtaaatttacctggcaaatctggtttatttttattcagccaacgcattgcgccagagtaagttttgccattctttttagattgatagactaaataaattacccaatcgtctgcatcatcttgcatttttttaatccaatcttgaaagtctttaagatccttatcttccatagtcagccatctccattccgtcaaaatagtcttctaggaagctggttaattcttcacgattatcacagttttcaaataagtactgatacatatcctttgcatctgtgaattgacctttaaccatgaatttatcagcgtcatcagctaactgttcttcaataaaatcaagtggtgttctgtactcacaattctgaccaattgcatgaactgtattccctacaactaccgttaagcaatcccaaccagcataaaaatcacgctgtttttcaatcttttggtagttgagttctttagctaattcttttccttgttttgcttccatgatggttttctccctgtttcgtactgactagtaactacatcagtaattgcccaaattcgttgttgtgtttctttgctaagttccatgagttaacctccaataatttgaaatgctgcatcccaaaagccatagcacaaaagagtgaacgttaagatcacgactgctattaagatgccaccaaagatagtttcataatggctttctttatgttggattggtttattaaactcacggtaataattcttatttagcatcccaatcaatttcctttctatgttcattcatccaaatagcagctggatattcaaagattgtcatcttaccgcctctgcctggatgaatattgctacaccaatccggttgaaatggataaagaatatttctttttacccatgcttgtccgtgtggcttagcgtatttcttagcaaattcatcaatactgattgttcttccttgcagttgctcttcagggacatagccacgttctttcataatttgatcaactgctttttgaagttcagtgtcattaatgactagttgcattgtcatcacctggcctatacttctaacaagttcatttgttctgcaacgggatgaatatcatctttagctaatagatcataaatgaatttcttgcctttttgagtccatttaagattgttgtgaactccatgttgaccattatttttttgataatcatatggttcatattgcgtataacctttgtcagcatatttttgatataaaacccaatgtttaccttgtttgaaaataatgtgacgtttattcaactctttatttaaagttttggctgaccaaccataatctttcgcaatttcggtagttgtcataagaccagggtttctcatttgggagtcgaaataatcaacctttggtttctgttttgctaattgctctgcctgatctgctgctaaacgcaaagcttcaggcaatgttttaggaatattgaatttacttggaatttcaatctgttgtttcatttgattaaacaaactcacatattgagcagtaaattgatttccttttttaccagtcatcttatttgctacgaactcgcatccctgtttagtgagcagataattaggtaatacttttccttgcttactggtataagtgcttggaataaagaactgacgtgagctcaaatttgagctctcctctatatctttgatgtaagtacgaatatcacgcattaagttcttgtgttctttaccaatcatttttgcgacatctcggctgtctaaaactgactgaccttcaaaatctaagagtttcataattacttttcctccttatcttctctagctaacttaaatagaaattgtgttgttactcctaagtagtcagcaacatcttgtaatgaatcagctctgggcatacttctatcccatttgctgatcattccgttggacatcttcaagtcatgttcaatctgataaattgacttgtgtttttcctttgcaatgtctttaatcactgaataaagtgacatattagactcctttcttagattttatattgatttataatagaatttgttctattatatgagtataagaaataagccaaatcgtaagacctatgcttacaaaaggcggttcaaaagattttttgctatgtttcctttgaacagtttttattataatagcccgttttctaaattgcaagcatttattttagattttgttctatttcttatgtcgtgtcaaaataaaggagtataaaatgagtgcgaaagacaatgtaatgaggctttggaaagaaagaagacctgatataaaatcagtagctgaattagaaagaaaaatggatttaagtaacggaatcatcagcaaatgggaaacgaaaaagccttcaacggctagtgcacaaaaggttgctgatttttttaaagtaccattaagtgaagtcttagatgatgttacagatgaatctgtaacgctgaacaaaaatgatcaagaacttttagcaatgtttagaaaagaaaccgatggaatgtcaaatgaagaaaaacaagattttcaagattctttaggtattttgatgaacactgcaaagcaaattgttaaaagacgtagaaagagtgaaaaataatatgcctggatacgaatatagattaataccagaagattcatatgaaagtagcaatgatattgctaattctatagttgaagatactgctttaaaatacaatgtacctaaatcagaggtaaggtatccaatggttattaactatctttattcgataatcgggacatgcgatatatgtgcttatacacctaatttaattttcccttttgaaaataatggtcaaaatgctttaaatgattttaattatggattaactgctagaaatatttcatttacagcgcaatctattgatgaagtaagtactacttttgcaaatagagtctgcggctttaccctttttcccgctagtggaccaattatgtttttaaatgcaagtattaatacttggggaagaataatatttactattattcatgagctttcacatgcttatcaagcattagacgaccccacatataaaagttctgttgctttaataaatgcgcaaaagagccaaggaaatccttatcctgaagagcttcagcccattgaaacagaagctaatataattgcttcaaatgtttatgttccagaagattcattaaaaaaagaaattatgaataaatcatttaatcaaatgaaagacatttatggaatgagctcagcagcattacataacagacttaaaaactttttgcattatactattggaatgtcaattaatgctgctttggaatatacattagcatttagaaataataacacgataaaaatggatatttgtcgaagctattgtattcaaagtctgcataaccctgttgtgttttaaaacgtccacagtgacgttaaacctgaaagaaataaggagccaaaacaaatgactgataaaaaagaagacaataaagatggttctgttggttgtgcaataggatttattataataattgcggttttagtgggagggttcttatggataagacattctaatgagcaaagcaccgcaaatattgagagacaagaaagaattgaaagtcaaaaggctaaaaaaagcaatgcaattaaaaagcagaaagctaaccaaactaatgctttaattgttaaaaacattaaggctttccgttctaaaaatgatccagatactaattggtcaaaatatgtaagcaaagttactgttaattccaaagctaacttatctgtggaagttaatgatcgttttgttaatttatctgacaaggataagactacttgcatgcgtggtattaacaaagaagctacatgggatgcttatcattatggcttaattagtaagtctaaagttggcaatcgtttatgggcacaaatatttgacgatgacaataatgaaatgggacgttccacatttgatgtttatgataactataagtggaattaatctataaaacaaaaaagcccacctactgctggaacagtaagtgagcgcaactcaataaacttaataatacttataatgtaatagagtaacgataaaccgactggaatcggcttatttcgtctaccctattttagcaaaaataggagtaaaaataaaatggcatcaataagaaaacgtggcaaaacctggtatgtaagattttcaaagagagaaactcaatgggatccagaaaaacaaaagaatgtttctattttaaaacaaaaatcaaaaggcggtttcaaaaccaagtctgaagcacaacagtacggaattaaaatggaagccgcttctattgatggtgtagatgtagttaagaaccctgtgttcgctgactattttgaacactggtatcttacttttaaattcccgattatcagaaaatcaacgcaaaagagatatattaccaattatcattatcttgaaaaatattttggatcaacaaaaataaaagatatttcaagagctaaatatcaaagcttcttaaattggcttggtaaaaaccatgctcctgctacagttcgtaaaaccaatattatggttaaagcttgtgcaggaaatgcaatagaggatggtttaatcgttaagaattttaccaatcgcacaaccatcacaggaaatcaagacaatgtcagagccatagaataccttaatgaaggagaaatgaataagctggtacaattatgcttaacaaatttaactcctcgttatactagcaaatatttagttctagcggggttatttacaggcgcacgacttggagaactaacagctttaaaatggactgatattgattttaagaataaaattattgatattaataaaacctggaatcctaatttaaaaatactaggaccaactaaaaccgaaagttcagttcgaaagattaaagttaattctttcttattagataaattgaaacaattaaaaattaataattctgaatttatttttgctattcctagaactggattaccaccttctagttctgctgtaaatcaattcttaagaaaagccattaaggaaattggacttaacaaacctgattttcacttccatagtttaaggcatacccatgtttcatacttaatttctcaaggaattgatatagctgctatcagtaaacgcttaggacatgctaatatagcaatcactttatcaatctatgctcacttacttgatgaatataaggatcaacaagatgccaaaattattaattcactcaatcaagtttgtgcaacatttgtgcaacaccgtgaaaaattctatgatattgcaaaacattaaatcctataatatcaacgatttaaagcttataaatatttctaaaaacctatattttaattcaaccaaggctttaaagtctggtaaagttactcgtgcctaatagaccaagagcttgttagatcactgatcttgcaagcttatttttttacttattttaatgatttatataaaaaacggtaagaagaccattttattttgtcttcttaccgttttactttacttcataatattgtgatgcttatcgtcatcaggaatttcgtcggccattctttcatcaattggcgtgtatgcatactcagtaatcatttcacccaccttagttggcaagtccaaatcttgataagttacatttctagctaagccattgatagtagctacttccttcttcttctttttatcaaaaatgtgaacgtggttcttgtacatgtagtcttctacattttattttgcacggtcaagtcttgcttcgtagcgaccgttttcgaaaccagcaatatctttttcaaagtcaatatatttcatttgaattcccttgtttcttttctatagttctattttaacctataaatcatgaaaacgattaatatctttagaataaattgctgcaatcataccattttgcaagctaatcctgaattcattactattaggcaaaaattcatttgatgaaaaaacacgaggatagttcccagaatagtgcttcaactcatatcttgcaccaataatattaaaatcttcgattgcttttaaagctgcaaaaccaatataagaataattttttcttttttgaacaacatgcgtgcctgcattaaaaaagcaaattagattttgttggtcaatcaacgttacttttttcgcatataatctcatttcaggatttagcaacattaatagattgatcaaaaaatgatccaatcttccacctgtagcaccaaaaatcactaattcatccacatgataatcttcaaaagcaatctgcaacattagctcagaatcagtccaatccttgacaggattagaataacgaatgtcttgaacattactttctatttggcttaagtcattttcgtgtaaagaatcaaagtcacctactgccacatcaggtattattcccagttcttctaaaaacaaggcaccacgatcaaccccaataactaaatcagcttgagccagcttttcttcaatatcttcaggccacaattcagttggaccgcccaacaatgcatatgctttcattacttaataatcttttctaatttatgtacttgactgccaacatcaccattttcatacaagtatgaaccaacaacaaatatattagcgccagcattttcagctaatttaatagtctgatcattaataccgccgtcgacctcaatatcaaaatcagagccgacaatctctctaactgacttaattcgattaactgattcaggaagaaaactctgtccaccaaatcccggcttgaccgtcattactaatacttgtttcagtaatggcaaatacggttcaaccacttcaactggtgtatctggactaattgccaaagcagcatcaacgccattagaagctaaataatcgaaccaataatataacttaggcttgtccattgcttcatagtgtagttcgaccaaatctgctcctgcactaacaaaagctggtaccaacttatctggggcatcactcattaagtgaatttcagcatctgtcatcggaaattcacgcttgaaatctttgattagttgcggtccaaaagataaattaggcacaaaatgtccatccataatatcaatatgaaaacggctaattccggcctggactgcattttcaatatcatttttaagatcaatattatttgcgttcaaaattgagggtgcaatcatcatcagctattacctctattttaaatattccggtatgcgaccttcgctaatctcagtccgcatagccaaataatcctcatatctactttccagaatttctctggcttcaagtaacttctttacttcacagcctggctcctgcaaatgctgacatccgcggaacttacagtgaatacttgcctttttaaactcaacaaagtaattacataactcattcaacttgattggtgtcaaatcaattgacgaaaaacctggcgtatctgctaaaaagcccgcgcctaacttaaaaagttcgacctttctagtagtatgtttcccacgattcaagctagttgatatcgcaccagtcgcttgattagcatctttttttaaatggttaagcaaagttgacttaccagcacctgactgtcctgctaaagtccaaatttgatttttttcgatcattttaggaatctgaatttgcatttcatgataatcagtgaaaacaagataacctattttttgataatatgctaaagcttgcttgattgtgtttaactttgcttctgatagcaaatctgctttagacaagtaaattgttacaccaactttttgccaagaaaagaaagtcaaaaaacgatctaacagctctacagaaaaatccggttctactgcagaaattactaacaaaacatgacttacattagcaactgctggtcgcccaattcgattaatccgcggcaagattttcaccagatagctcattcctttatcatctatctgaatttccacatgatcgccaactgccggtttttgctttttttgacgaaaaacgccgcgagcacgcgttctcacgatacccgcagcggtttctacatcataataaccagcaatcaaaccaacgacggttccttgcgctagtttcatttatttagtcaccttttcattcaaaactgtatcgccattgcgaacaacctttaattgtccactaccttctctaatgttaaatggaatcgagaaactcatatcatgcttaatatacaagtcacgataaatattgttcaaggaatgatcatcatccttaatatagatctggacatgatcacccttgccattaacggattctgactcagagttattgcttcctttatcattatcaggcttctcactcttagaaagatcatcaccaacatagttaacggtaaaggtcttagttacagtagtttccttgtcttcctttggacctttcgagatcttgatggtaacagttgaaccacgctcaaccttagtacccggacctggctccatcgaaattactaagcccttctcaacatcatcagaatattcttgattgatttgtaaagtcaggccatgttctttggcatagtcttgagcactcttcaaagaataattacttaagtctttcaaggtaaccatatttgaatgtgatctagcctgcttgccacgtgaaactatcaacgtaattgtagtctgcgtcggcttaacctctacacctgcagcaatgctttgagaaataacttgattttcgtcaactttattagaatattggtcctctctaactacattaaagcccatattttctaatttttctgccgcttcggcatagttcttcccaaccatatcaggaactttaaccatgctagaaccgctggaaacaattaaatcaacgctctttccccgctctagactattgcctgcagttggttttgtcgcaataacccggcctttttttatatcatctgattgtcgcctaataatttttccaacctgtaagcctgctgcttcaagtttactctcagctgctttttctgcaatattagttacatcaggaatattaacatcctgtcgtttatttccagtaccacttaaagcgaaaatcatcataaaaatgattaaacccgcggcaataattgagatcagccaccaccatttgtgacttttgacattctgtaaaaaagtctttttctttactagcttgcttgattctactgattcggtttttgctggctccaccacttctttttcttccttttgtggcttaaatccaggcaatacaattgttttatcatcgttattaccatgatatggtacaaaaaccggttcatctgcccgttcaggatccaagctactatccaaatctgctttcatttcctgagctgtagcatatctatctcgtggatctttcgcggttgcctttaaaacaacattttccagcgcctgtggtacacttgaatctttcttgcgaattgaaggaattggttcttgcgcatgcttcagtgcaattgccactggtgtatcaccgttaaacggaacagttcctgtgatcaattcatataaaattattcccaaggaatagatgtcagattgtttagtaaccattccgccacgcgtttgctcaggagacatataatgaactgaacccattactgaattagtttgtgtaatcgagctttgattcaaagcaacggcaattccgaaatcagctattttaatattgccgcgcttatccatcaaaatattctgtggttttagatcacgatgaataacattgtgcttatgagctaatgcaactgcactcaatatctgatccataattcgaataatttcatttaaatccaaaggtgaatttttttgaatatattcttttagattaggaccatcaacatactccattaccatgtatggcaaaccatgatcggtacctacatcaagtacagaaacaatattaggatgacttaattcacttgtagctaatgcctctctttgaaaacgagcttgggtttgcggttcattctgcaaatcaaggcgtaaaattttaactgccaccttacgttgcaggataatatcttccgctagatagacattggccattccgccttcacctaaggtatcgatgatgcggtaacgttccccaagcagataacctttatcgatcactgctctcgtcctccttgttccaaattaagcagacagtaatattatcaccaccacctaatcgattggcctcactaatcaatttattacaacgttctcttaagctaagctccttagttgccaaaatttgttggatttgtggatcgctaagtgaattggttaggccatcagtacagagcaaaataatgtcgttttcccccatcttgatctcatcaaattcaggatcaatcgtacttgagacgcctaatgcttgcgtaataatatttttctggggatggtgtttagcttgttctttagtaatctgacccatcttaactaattcgttaaccaaagaatgatcttcagttaattggacaaatttaccttcagaataactataagcccgagaatcacctaaatgagcaattaaggcatttttatcaaatgcaaacgccaatacaatcgttgtccccattccatttaagtcaggaaacttatcagcagtctttaaaattgtttcattttcagaatttaattgcacatcaagccatttatgagcgagattagcatctgcaaagtcagtcatactaaaattatgtcctaaatgggtgactgccattgttgaagcaacgtcaccaccttgatggccgcccataccatcacagacaattgctaagacaattcccttttgatttttaaaaacttttacaaaatcttgattgcttttccgtaccttaccaatactcgaagcgtatgctgtttcaatcaaaaatctaacctcgtaacttaaatttagcaatgaaaaatccatcattgccatctagatcaggcattattttcaacatccctgtctttgattcaagtttagttaacttaaatggaactagttcaaagtcaggatgtgcttgcaaaaacttcttaactacctcttcattttcttccattgaaattgagcaagttgaataaaccaactcgccattcttttttaagagtgaacttactgcagttaagattgccaattgaattttttgtaaattttgtaagtcctgttgtctcttagtatagcgaatttcaggcttacgacgcaataatccaagcccagaacaaggggcatcgactaaaatttttgtaaattcacctgccgcaaaaatctctgtagccttacgtgcatcacatgccttagtctttaccttatttgcaacgtgcattctctgggcattatctcgtactaaacgtaattttttatcatgaatatctaaggcagtcacatcaccattaacaatgctttcggcaatttgcacggttttcccaccgggagcagaacaagcatcaagcacatgctcatcttgttcaaagtcaaaagcttctacgactaaactggcagcttcatcttgaattgttaacttgccttcttcaaacaaatcactttcgctaatgccaccgtgactcaaaatcacatcatcgcttgataacttagaccattgtggttgatagttatcccgctctaactgggcaaaaacttgctctttatctgccaactttgaaatacgtacactgtttttagctggctcattaatactgtttaaaactgattttgccttgtctaggccccagttatcaattaaatattgaactaaccattcaggtacgctctctttgacacttaaatatttaactggattattttcagctggtaaaatcaccccgcgcctagtaaacgaacgcaaaatcccatttaccaaccgaaagccagctgaatgtcgcttgccatattgcttagcaagtttattagcctcatcaagtacagcacgatcaggcactttatccaaaaaaatcaactggtaaagtgacattaacaataatggcttaatatatttttcggtcagttttgtcctaactaagccttttaactgatattctaaaaacaatcgatactgaatcgtgccataaacaatattagtagctaaattttggtctgcaattgacaagttagagtgctttaagctgttattcaaactaatattagaataggagccttgatctaagaccttgatcaatgtctctaagctgactgcacgtgcactcttatcgatcgacaatttcttcacctgggacaaacttactaccttgaccatttaaaaagctcttgatgtccattctctttttgccacttggttgaacttcaagtaagttaagtactgaattatcagcaaaactaatggcaaaacgtcctttgttagcaacaacagagccggcatttaaacttgatgaatcagatgcaatttctgccttccagatcttgaaacgtttgccttcaatcatcaaataagcaccaggatctggattcaaagcacgaatcatatcgttggcctcttctgctgtcatatcaacattaagcttttcttgttctttagtgatgttaggtgaaaagacgaccttttctggatcctgtggaacctttttaattgagccatcaataattgctggtaaagtcttaagcaataagtcccgcccaacaattgataatttactaaataaagtgccagcgttatcatcaggctcaatcttaattgcttcttgagcataaatatcaccagcatccatcttcttaaccatttccataatggtaattccagtttctttatcaccgttaattagtgaatattgaattggtgcaccgccacggtatttaggcaaaagtgagccgtgaacattaactgccgcaattttaaccgaattcaaaaacttagttggtaaaaattgcccatatgctgcagttacaatcaaatctgcatgcatatcaattaatttctgcatttcgtctgatccagacaacttaaccggttgaaagattggcaaatcatgcttttctgctgcgatcttggctggtgacttagtaattttctgcttacgtcctacctttttatcaggttgagtgaccacggctttaatctcatagccttcatcaattaacccttcaagtactggaactgaaaatttcggtgttcccataaatattattgatgtcattaaagcatccccttacataattctctctggttcattatcaataaaaatacttaaaccatatttcttagcttcctgcgcggaatcttgaacatggtgtaataattcatttaaatttggttcttttttatattttaccagtatttgataataatatttattttttacacgagaaattgcacttggcgttggtcccaaaataatcgttggctcatgcaagtgctcattcaaatacctcttaatcctaaaagcctcacgagctgcattctgttcttttttagcagcaatggaaatcagcacggtataaaaatatggtggatagttaccagcatgccgcatattcatctcatagccataaaatcgttcgtagtcctgagtttgagctagttgaatagcataatgctctggattataagtttgaattaagacttccccttccttatcagcacgacctgcacggccagctacttgagttaataattcaaaagtcttttcagaagcattatagtcagaaagccataatcctgtatcggcattgattactccaactaaagttacattagggaaatctaatcctttagcaatcatttgcgtacctaacaaaatatcagcttcatgagcaccaaaggcatctagaattttcttatagctaccctttcttctagttgtatcaacgtccatccgcaagattcgtgcaccaggcagaagctcttctaattcttcttgtaccttctgtgtacctgcacctaaaaaacgaatttgcgagctttggcaattaggacaacgtgtgggtactggctcagtatgaccacaatagtgacattgcatactgttagtatccttatgcaaatttaaagaaacatcacaattaggacattttaatacaaaaccacattcacggcaaagcataaaattagcaaaaccacgtcgattgagcattaaaataacctgctctttttttgccaaacgcttttttattgcatctactagctcaacagataaatcaaattgaccaccagcaaactgcacgtgctttagatcaatcaaattaactttaggcaatttcttttgattagccctttcagttaaccgtaaaagatgatagacatttttttgggcgcgtgcacggctactcaacgatggtgttgcacttcctaaaaccaacggacaattatgaaatttactacgccaaatagccacatcacgtgcattataacgtggatcggtttcttgcttatatgaagactcatgttcctcatcgatcacgattaaaccaatattatctagtggagcaaaaactgcactccgagcgccaacgaccaccttagtctcgccacgacgaattcggcgccactcatcatatttttctccctcagatagggcactatgtaaaacggctacctcttgaccaaaacgtgccttaacctgacgaaccatttgcggcgtcaaggaaatttctggcaccagcattaatgcatttcgcccctgtttaagagccttgctaatagcgtgtaaatacacttcagtcttcccgctaccagtaatcccttccaacaaaaaagtctcagcctggcgctgttcaattgcttgggtgatctggttcaaagcaccttgctgctcaccatttaaggtaaccgctgttttatgttctccgtcatcaaatccggataacggatcgcgataaacctcaacactttttttattcaaccaacctttggtaatcgcagaattcaaactcgccgccgtcaatccaagctgtttttctagctggctttggcttttgggataatccgctgcattatcaatgatatccatcaataactttttttgctttaccgcattttgacgtaaagtattgtaaattttgggatattcctctttttttaatgctagttcatattgattttcttttttcttcttggctcgattttctaccacatactcaatctttgcttgatcatcttgcaataatttgcggaattgcttaatctccgccagatccgtaattttatttaaatcaattggatcaccctgaaacagcggcattttggcagctctatcattagctggcactagcaatttgcgataatttgctcgcattacccaaggtagcatcgcttgtaaaattttaattcggtaagaaaaaatattttttgctaaatcagcagataactttaccaactctggcgtaagcggtggcatctcatctaccacaactagcaaatccttaagtttacctttaaattcactttgatcagtgatccccaccacaaaaccttgcactttacgaggaccaaacggaacaactactcttgatccaatcgcaatatccttttctaattctgttggaatatgatattcaaaaatacggtctgtttgccgtgcagctacatcaacaataacctgagcaatcatttaatcacctgtaaaaaagaccttcaccccaaaggatgaaggtcaataaattaatcttcgaggttaacctcggcatgagctgggtcaacagtaactttaccagcagcaatttcttcaagtgccttaccaacagccttatcacacttaaaatgttccaaagttggtggatcaccagcttcaagttcatgtgctctcttagcggcaagaacagataatgaatagcgtgaatcaacacgtgacaataatttatcaattgatgggtaagtaattctcataataattaatcctccttgaccatcttacgatagtcatcaattacacgtttaacactgacatgttctgcatcgacgatcgctttaatatgatcaactgcattagctactgtatcattaactactgcataatcatagtcttccatctccaaaatttcattgcgcgcttgcttaattcgaccacgaattacatcttctgactcggtgccacggtgttccaaacgcaaatgtaacgtatgtagatctggtggggttaaaaagataaacacgccatcgggcatcttttcacgtactttttgtgccccattaacatcaatctcaagtaaaacatctttgccatcatgaagcatcttcttcactggtgcaagaggtgtaccataatagtgaccgacatatttattatattctaacaactcaccatttttaatagcctcttgaaagcgatcttcactaacaaaaaaataatcttggccattaacctcacctggtcgcggttgacgcgtagtcattgaaactgaatattcaaatggaaagactttgttttcaacaatcgcgcttttaacagttcctttaccaacgccggaaggaccagaaagcacaagtaataaacctttatctgccatgctgaactcctcttaacttgtaatatatctagtttgcactaaaattgtttctttttcaagttttctctttgcatacaaaaaaacagacaaaatcgtctgctcctttactaaattattttctcgaatgtctcacacactacttcagtttcatctgtgaactctcgtcccagttcttgacattcgcgcgcaaaaaatttctcgtgtactttacgccaagattcatatgagcgatcgccctcgccttctaaataggcatgctcagctgagacatttttaaatggcataatctcaacagtcttattttgaatcacacaaactggttcatttcgtccatttaaaacaattgcgtacatccctacaaccggtacatcttcttgcgcagaatacaggctagtcgttgccgtcttaattccacttttgaccaaatcactaagaatatctgcatcccggctattagctccaaaagcaaaagcaccttctaatgctgtaggacttacttgatgttctacacaaaaatcacgccaaaatttactaatactagtcatctttaatactcttaatcaaatctgcagcattcttctttgctgcatcggttacatcttgtccagccatcatctgtgcaatcgctgtaatggtttcttccttgctaagtgggcctatttgagtaaaggttgaaccatcttttacttgcttagctaccaagtagcgttgatcacccgcggcagccacttgtggtgagtgcgtaattgcaattacctgcttgttgcgaccgattgagtgcatctttttcccgatagcagccgatactcggccagaaactcccgtatcaatttcgtcaaaaatcatggtacccactggttcaactcggctgaagattgccttcaaagctaagatcaatcttgattgttcaccaccagaaacaattttaactaatggcattaaatcttcacctggattaggtgcaattaagaaaacaatcgcatcagttcccttatcggtaaatgtctttgtttcatcaaaattaatagaaaagcgagctttttccatgtagagatcagctaactcttgcttaatctgctcttccagagaatgagccactttttcgcgtattaaatgcagatctctagcttcttgggtcattctttcttcaatcttggcaacttctgcttgcaatttttcctcatcaaggccgcctgtttcaaattgactgagttctttttgtactttttgataaaaagcaaacacatcagccaaggttgggccatacttctttttcaatgaattcaaggtatccaagcggttagtcacgtattgaaaacgttcctcatcgaagtccattgcatccattaagttcgataattcactgcgggcgtcatttaaagcataaactccatcatcaactgtcttagcaaaatccttaaattttgaaccaaattcagttaaatcagtcgcagcattttgcgcatctccaagtaaagttgcaattccatgctcatcgtcatcatacaattgcatgaagtaattcgccgtatccgcaattttttgataattatttagttcgttatattcttcctcaagtttctcatcttcttgtggatcctcaaggtcggctgcttccaattcattattctgaaactgcagaatatcttgcttctgagctaattcttgggcatcttgacgcaggtgcagcaattgactggttagcttttgccattgagcataatcagtttgataagtggctaaatctgccttaaaagaagcaggggcataattatcaactaggtcaatctgccggtcctgatccatcaaaatttgctgatcatgctggccgtgaatatcaaccaaatagctaccaatctcgcgcaaaacattaatcgtcgtcaattgcccgttaatccggactacatttctgcccttgacagctaattcacgactaatcaccagctgatcgtcatcgtgcggcaaaccatattgatcacacaattccgcgatcttttctttttgatcatccaattcaaacaagccagtaataatcgccttggactcacccgaacgaatcatttctttttgaccgcgaccacccatcagtaatgaaacagcatcaataataattgacttaccagcaccagtttcaccgatgattaccgtcattttttcttgaaaacgaacctttaagcttttaataattgcaaagtttttgatatctagctcaactagcatagcttcactcctatagaccacttacggcgcgctcaaccacttcagctgggctcccttgccataagttgcggccaccatttgcttcgtctttttgtaaatgaatcaagaattcaatattgcctttgccacctttaattggtgaataatcaacgcctaaaacattgaagccgatctccaatgccttttgcatggtgtgctcgattaccgccttgtgcacttcatgatcatgaacaataccgtgtttaccgacattctcagggccagcttcaaattgtggtttaatcaaacaaacggcatcacattgattcttcaaaattgcatacatcggtgccatgatcaaatctaacgagataaaggacacatcggtcattgcaaaatctggcagtccttgatcaaaatcttccggcttcgaatagcggaaattctgcttttccatcaccactacacgcgggtcgtcccgcaattgccaagctaactggttgtagccaacatccaaggcatagaccatctgagcaccgttttgtaaagcaacatcagtaaaaccgccagttgatgcaccaatatctaaacaaattttatttgttaaatcaatgtcaaagaccttaagagctttttccagtttaaagccgccacgcgaaacatatttcttaccatcatctttcacgtaaaacttttccccttcaggaaacttagtcccgctcttatcaattcgttgatgattgtgatcagaaaccagccccgccataatcgctctttgggcagctgaacgagaatgaaaaattccttgttctgctaataaaatatctgctctttgttttgccatttataacaccttttgataaagatctaaaaagccagttagcacttcgccatttagtccatgcaaatcatcttgtgcttgcttaattaagtcagttagttctttgcgactttgatcaattcctaacaaagttaaagtattattctttccttcagcttcatccttgtgcgtagctttaccagcttctgcactagtttcaacgacatcaaccaagtcgtcatagatttggtatgaacgaccaaaaattttggcaaaatcgactaattttacctgttcaatatcactagctcctgcataaactgcagccatctcaacgctagcctgaattaagcaaccggtcttcagccattccatcttattgataaacttggcatcacccgcaacactagcattgttagttgaatcaatatccaaatattgaccgccaaccatcccattagggccaactgctttggtaattaaatctaccaatttcgccgacttactgccttccgcaatccattgaattcccatcggcaagagcgcatccccagctaaaattgcctcagcctcgccccattttttgtggctagtcagcttaccgcgccgatagtcatcgttatccatggcaggcaggtcatcatgaatcaaggaataagtgtgaatcagttcaatcccgcaggcaatcctaatttcaggttcttcaatctttctgcctaaagcatttaacgtagctaaaaacaataacggacgcaagcgcttgccgccacccatcactgagtaggccataatctgactgatcttttgatcttcaacctcactagccaaatgcttagccagataatcatcaattactggggtccattcatctttaaaataagtaaatgctgtcatatttattcctctggtgctgatgcgttatttggatctaatttgtgttctgtgccatcactatcaatcaacttagccacagtttcttcagcactgttaagcttcttttctaaatcacggctaatctttacgccctcctgaaattcttttagggcatcttccaacggaacatttccgttttccaaattttgcacgatttgttccaaattagttaattgttcttcaaaattatttttcttcactgccattttgttcttcctttacctttgtaaccactgcttcaacttgtccatctttaaaatgcaatcgcaaatgatcatccttttgaacttgtttcacagaactaatggttttcccttgttcatcagttgaataaacaaaacctcgctctagcgtcttcaaagggctatagtcatccaactgctgcattacttgggtaaaactattgcgtttatttttcaaatagtgctgcatattatcaatcagtcgttgctgtaaaaaatgctcttgttgctgcatctggccgattctcttatctggactaacgctaaacaaacgctgcttcaacagttgataaccttggacagaatgggtcaaccgattttgcatactattttgcagcctttgttttaattgatcaacttgttgaatctgctgatcatacagtctagtcggctcgcgcaggatgacagaattctgcacccgacttaagcgctcacgtttcgaacgaataatattttgcatgctagctaccaactggctggttaattgcttaatatgcgcaatttcgtccaatgtattaggcgtagcatattctgctgcagcagttggtgttgctgcacgcgcatcggccaccaaatcacacaaggtagtatccgtttcatgaccaactgaagaaattactggcatctgcattgcgtaaacttgccgcacaacctcttcttcattgaatggccacaaatcttctagtgagccaccaccacgaccgatgatcatgacatcatacttgtcgccttgagcggcaatctggcgcattgctctcactaatgaatccgctgcagtatcaccctggacttgcgcaggatacaaatcaatctcagcatgcgggaaacgccgattagctgtaaccataatatcgtgaataactgccccagaagcactagtaactactgcaattcgatcaggaaaatgaggcaacttcttcttatgctctggatcaaacagaccttctttggctaatttggcctgcaactgcttcaattgctcatataaggcacctaatcctgccggttccatttgttcagcataaaactgatacgagccctgtgggccatacacgctgacatacccaaccacataaaccttcattccttcttctggtttaaatttcaccttatcaaagaaggaacggaacatcaccacattaattttagatttttcatcttttagtgaaaaatactggtgcgaattacgccgataacggaagttggacaattcaccttgtaagaagaccttatgcaggtaaggatcattcttaaatttttgcgtaatataataatttaaatcagtaaccgttaaatatttattctcggccattttgtctcctagtcaatttaacaactgcttccattaagaattgtactgtaagaggacctacaccgccaggaaccggagtaatatagctggctttttctttaacattatcaaagtcaacgtctccgactaatttgccattaacatgattcatgcccacatcaacgaccactgccccatctttaaccatatctgcagttaccaaaaatgcttgtcctgttgctgaaactactatatcggcttgtcgtgtaatttcagccagatttttagtatacaaatggcaaacagtaacagtagcattttcctctaacattaatgccgctactggtttgcctacgatattgcttcgaccaataactacaactctcttaccagccagcgtaatttgataatgtttcaataaagcaataatgccttctgcagtagccggttcaacaaagtgattttccatccaaagttgaccaatattcgcaggcgttaaggcgtcgacatccttattagggtcaatcctttttaacaaggcatctgcatcaatctgttcaggtgctggcaactgtaccatcaagccgttaatctcaggatcagcatttagcttatcaattaatgctaaaacttcttcctgtttagtatcagcgggcatttgataaatatcttggataattcccatcttttcagcccgccgcttttttgttcgaacataaatcttgctagcaggatcatccccaatatttattacgcaaaaatgtggcgttattccctcttcttttaatttcttaactttttctttaagattttgccctaattcatttgcaaatgctttaccatcaagaatctttcccataaagcccgttctccttttgtaaaaaaataactggcaaaactgccggctattcatcgctatttaacaaagtttgctaacattccattaataaatggcttttctttaggctcagcaaattcgtcacataaatttaaagcttcgttaactgctgccttagcatcaatttcatcgctatgcttgatttcaaataaagcaacttccatgatggctaccacagtttgactcacacgttcaagacgccagccctttttcaaatgactagttagttcagactgtaaatttttgcgatcttctagtacgccttcgattaacttcttagaataggcagaaagctgttttaaattaagcgttgcaacgacttttgcttcaacttcttcggcagttaaatctggctcctgattagccaaataaacggcttgcatagcaacttttcgactttcgtgttggttcattatttttcttcttcgtcctccggaaacagctctgatgtagtctggtcagtattttcatcttctgggaaaactaaaccgacaacatgaacgttgattgccttcagctcaagatcagtcatttgcaataattgtgccttcaacttcttttgcaacgtcattgcaaccttaggaacgttaacgccgctttcaagataaacataaatatcagcaattagcttattatcgtcatcaacactaatatttacgcccttaccatgatcttcacgaccgaaaacccagtttaagcctgatttcaaactgccgcgcattccggcaacaccatcaactttttctgcagcaatacccaaaataacttctagaacacttggatcaattttaatttgctcgctgttttcttcaccacttaaaagaatttttgaactatctgccattttgttacctcaaataaactacttatttgcacgtgatacgtaagtaccatcagcagtgttaatagttaaaacgtcaccttcgttaatgaagaatggtacgttaactactaaaccagtttccatagtagctggcttaccaccacctgatgaagtatcacccttgatgttaggttcagtcttagcaaccttcaaatcaaccgtattaggcaattggatacctaaagtttcaccttcgtgcataactacgttaacaatcatgttttccaataagtaattagcttcatcgccaatttgttcatttggaattgctaattgatcgtaagtagaagtatccatgaatacataacttgagccatcattgtacaagtattgcattgacttagtttgaatgtctgcagtttcaaccttagcagttgaacggaaagtatattcttgtacagcaccagttctcaaactcttaagctttgaacgtacaaaggcactacccttacctggttttacgtgttggaattcaacaatgcgccataaatcgttgttgtattgaatagtcaagccattcttgaattcgtttactgaaatcattgtcatattaagtccctcatttctacaattattatcttaccaatcttgaagcgtttttaccataaatacgataaattaaatagctattatagggaaatcaattcatcctttggcaaagtggataaagtttcaggcgtttgatcatggaccaaaatatcgtcttcgattctaacaccgcccttgtctggcaagtagattcctggttctacggtatgaaccatattattgaccaatttagtagttctaaaaggtaaagctggttgacacaattcgtgaatttcaagaccaatgccgtgaccgatcccgtgtccaaaatactgaccgtaaccttgttctgtaatataatcacgtgctgctttatcaacatcatatccagtattacctgcaactgccgcggcaatgccacggcgttgtgcttcatgtacaatatcatagattttatgcatttcagcatcaacttcacctaatgaaacagttctagtaatatctgccgcataaccgtgataaaaactaccaaagtcaatgacaatcatatcgccttcggacaattctttgtcactagcaacgccatgagcccaagccgaacgcacaccggaagctacaattgtatcgaaatcagggccatcgccgccattaactttaaataggtagtccaatttagcaccaattgcacgttctttaacgccaggcttaatcatcggcaaaatacctttaaagctttccattgaaatatcaattgctttgcgcaatgccgcaatttcaagatcatctttaatattacgtactcgttcaaccaattcttcaaccatcacaaattcaagttctggatttagttgcttaagtttttcatattcactcgctgaaacgaattcaccttcaactaagaccctcttgacgtccatttttttcaaggccttagtaagttcttcataatcactagaatgtttcattacaacatccatttcgccaggtgcttgtgctttaatctgtccagcaaaacgagaatctgataaaagtactcgttcgccactagcagtcaaaattaattgtgcttcttcccctgtaaaattggttagatatcgataattagcttgattaaaaataatcaatgcatctgcatttgcttctttaattaaatcagttacatgctcaattcgctggttaattaaggataataattcttgcctattttccatctcagagaccctctttttgtatgatattggtttaattatacatgtttctgggcggaaaaagccataaaaaaagacgggtggcttatgctactcgccttttcatgttaatctctgaattacttagcttcttcagctgggtatacagaaacttgcttcttgtacttgccaagacgttcaaatttaacaacgccgttaacaagtgcaaataaagtgtcgtctccaccttgacctacgttcttgcctgggtgaaccttagtaccacgttgacggtaaataatagtacctgcgtgaatagtttgaccgtcaccagccttggcgcctaaacgacgaccagctgagttacgaccgttggcagtagaaccaccacccttgtggtgagcgtataatttcatacctaaaatgttcatattcatttcacctctgaattaagcttcaatcttttcaactgtaaccttagtgtaaggttgacggtgaccatacttgctgtgtgagtgcttcttaggcttgtacttgaaagttacaactttcttttccttgccttgcttttcaactttagcagttaccttagcaccatctactaatggagtaccaaccttaacgtcgtcgccattagcaacaaggataacttcgtcaaaagttactgagctaccttcttcagcatcaagcttttctacaaatacgctatcgccttctgcaactttgtattgcttaccaccggtcttaataattgcgtacatttgtacacctccgaaaaaaatacttagactcgccgaactggggtgcttcttacataagaagacttctaacctcaagccgtgcggttgcagatgtggaggtctccacaaatacaactcttatatcatacaacgcttttagactaagatcaattatttttttacattcgccattgaccgccatgcacttttgcaacattttcggtaatgataaacgcatcctgatcgatctcatgtactttagaaataagtggcccatattcacgtggatcaactacgattaataattgacgcttgctttcgtcgctatatccacctataacatcataaatcgtcaggccttgataatcttctttaagcatatcttgaattcggtctaaatctgaattactcataattctgacttgatactttttatcaaaaccggtctccgcgtagcgcatcgtaatggcagttaccacttgagaaaatgctgctaagaagaaagcattccaaccatcgacaaaaatgttcaagaaaataattaccatatcaatgcataaaagcgtagttgcaggatttaaataaaaatatttcttcagaatcatcggcggaattgttgtcccaccacttgaggcattaacgcgataaagtagcgaaactccaagtcccattaatgcaccaccataaattacggctagtaggtcattattcactgctttaaagctaggcgtaacttccatcaaaactggtaagagcaaactacctaatgcaatattttgggtagtctttttgcctaaaaagattgccgccaaaatcagcatcaagccattcactacaaatactgtaattgatcgattaatcccccagaccgcatcgactagaatagaaatacccgttgagccaccagctgcaatattaatcggtccataaaaaagattgattgatattgcgattatttcaagtcctgctaaaaataccaaccatctcatccaggaacgttgtttaatgtttttcattattaagcgtcctttcttttagttagtactattttaacgaaaaatcatctgttagctcaagcaaacaaaataatgttaacaaattatttatttttaacttctttataatcgattgattgcgttccttcataagcaggtaaaccattttcagctcgatataatgctcgctcaaaagagcggtagcctttagatgaagaaacggcaaatttaacaccatactttgaagcgaattcctgaatattccaagtagcatcatgagcagcataagctgtcatcaagattacaatatctaagtctttgatttgccgttccattaccttcttcttgccttcaaaagcatctattggaattgggatcccattatagcgcgaaacaatcccttctaatattccttcattttgattatcaccaatcgcaattcccacccgctgatagtgcaaattcatgtcgagtttagttaactcttctgtttcttctttctttgacttatttttcttttgatacgacagatctgatttcttaggcggatcaacttgataaatccaacgaatctgtactgcctcagcaggatttttcttaatgcgaacatcacccgtataccaagctagatctacaattgaaccatcttcaacatgaatattttcaccttgataataacttgaatcaaccggaatcgtgatatccttaccgcgaattctcaacttttcgcccttaatatttctagtgatagctaattgattggccttgccgcggaccacagcataccggaattcttcgattgggtcataatcacgcatgcgcaatttgcgataacccaccacgcgcaagacttctgcttcataatttggattatctcgattttcaatagcttcaactatgtcaccgctctttaaattcaaagagtgaatttgtgattctttaatacggtaaacaatttgaccactatcattaatcaaattacagcctgataaagcccgaataacagtatagcggcgtcctttacgataatcgcgcttaggttgctctttgggcttcattgcttcttcaaaaattttcttgttaacagcttctttagttgtcttagatttttgaattgcctgatccaatttacccaaaacattgccatagcgcttgccaacgcctggaacaaacgtcaacttgtgtaaagcatcaagtgaactctttttagctttttcatcacctggagtctcaattaaggctgtcagcccaatcaataattgcttaatttgctttaaatctgcatttctttgtgcaattgattgtgtatttgcaattttattcttaggttgagttactgatttagtctcagatttttcagctgtattatcttcggccatatttaggatagctttaatcgcacttaaactattttcgagacttttatcatcagcctcagttttatttaaaattattttgatattatttcgataatcatacattattctcaccacttttattgtataacttactaatagtaacgaacataattatactgatttttatgaagtagtgttaattgattgatcgttttagtgattaaatttttttacgcaaaaagcagacaatctttatattgcctgcttcctaatttttctatttatcgagttctaagccaattgaaccaattagcgaaattttcacctgctgtaacacgatgaaccaatacaatacctactgcttttaccggctgactttgcgcagcagcaattggaaatgcagtagagagagcaacagtcagtgcagttgcagaaattgcaattttcttttttaaattcatttcaaatcctcctcgtaaatatctagacatcaacatcattatattacgtgggattctaaataaataattcatttatgcacacatagctttaaggctctaatacaagtttatatatttaactatataaaaaggcgactcacaatcgagtcgccttttactacaatttctaattattaagctctccactcgccgccttggccataagtatgcttacctaattcgttgataattacatgaatgtgttccttaggcgcaccagtattcttgtgcactgcttcagtaacatccttcattaagttagtaatctgctcatctgagcgacctttaattaattcaatatgtacaaatggcataatttagccctccttttttagtttaattatagtataaaaatttctcactaaaaagcaccaccgccgctgccaccaccaaagccgccagacgatccacctgaaaatccacctgagcttccggaaactgaagataaaccagtagacacgcctgaagagaagctacgttcaaaactatgctcaaaactgtcactactgctactatagaatccactataaaacagaactggtgcagcatctaattcatctgcaaattcaatcttaagctgcttcaatacctttttggatagaccaaacgctacagcatacggcataatgtcttcccataaaatcagatcaccgacgtctttcatcttgaattgaccaatatcgtctagcattttcttaaagcagcgaacttgatctgtctcaagtgcacctttttgggtataaatacttaaacgagaattgcccactatgaatgcagcaacttctaagacgatcatcatgattccaattattatcacaaaactgggtatattatttgccatcattaagctaattacccagatcgcaaagctagcaatcattcccatgagcatccccgttcggaagttgctacgctgctttttatattttttatcaagcaagtccttatcctcaacttgcttatattgcccgtcacaccatttatcaaaacgcctacccaattttttagaagtataatcccgcaaatctttcgttgtaaatgacttaccatcaccaactttgttaaaaataaaatctaataggtcatcagtcaaaacactatcatctactaaagtaattcgataattagtccgctttaaatgtttagtttgatatttttcgatcttaattttatttttaccggctaattgcatcaaataagctgtaaatgctttaacatttggtttatcagcttcatccaaaatttgcgcagcagtaggtgatatatctggaatttcataattatgtactaaatcgcgctctatttttggcttaaccccaacttttttaataaaaaagcctctaattatcaccacaaaaccgacaagtactgaaatgatcatcaatcctatactaagcatctgcttacgctgacgcttctgattagcttcttttgctaatgctgcttcttgtttttcaattgctcttttcttattttctttaacaatattctgattagcactagttaccgtagttggaaaaatcgcatgtacttcgacaccactatctcctgcaacatcatcagcagtcataataattttgccctcttttggcaaaacctgagtgtaaccacttagtggcccatgagcccaagcttttagccccttaactgccccaggaaaaatcacttcagcacgcacatgatctaagtcagtatcccaaccattaccaactattttaaagttcagctcagctgtatcaagataattagtaattgcccggtgaattagataagaatactcaactttaaccttatcattttccttaattcgatgataaaccttaaaattataagaattgccctgcttttgcaatttatacgtattatttttgcccgttgttgcggcctttatattttgtccatcgaccttaacctgaatgttgctcaacttctgttttacagccagattttgcttataataaaggccacgagcatcactatcaaatgaatacttaattgttcgatacattgtcagtgaaccatctttattaactcttgctatggctctaacattatcaatatcataatcaacatcagctctaacgctttgaccccaaatagcaaaaacgctcaataggcttaataaagccaataaaccaaggtatttcttcttcattatttatttcccatttttctgcaaaaatttatcaattaaagtatctgctcgactatgatatttacctttaaaatcatgacctgcacccttaaataagtataatttcgagtgcttaaattttttattagccataattgaataagaatctggaataatcatgtcacttgtaccatgcattattaaaactggaccatgatacttagttgcttcttttaacaagttatacttgaacaagttttcaaaataggccttaccaattgtgaagccaaataggttgagcttgtctggcacttgtttttctgatttaaaagccgctttcgcataatcagtgatcgaaaaggcagggtaaagcaaaatcaatgactttacttcttgcggatatttacttgcgagcattgcggcaactgctccaccttgactctcgcctagcaaagacacttgtttacggtcaacatcagtcctatttttaattgtatttaataccagctgtagattcttttcttctgtaaaaattgacatctttaattgatctacaccactactttgaccattcttagctccaccaggaaaatcaaaagtataggcaacatagccacaactagctaaatatttagcataactggttagatcacggtaatttcctgccaatccgtgagccaaaattactgctttcttcttaccagctaaaccctgtggtagatatatatgaccataaatatcaacgccatcttgttgaattcgcaaaacttggtctatcacttgatacttagcctgtttttccttagattgctgtttatcgactttaaccgttttaactgacgacttagccttcttaggcgtagtactttttatagtacaacccgttaaagtcagtagcatcaatattattgctataaatctttttttcaagtttatttcatccctatcagttaattaattcaggcgtttcctgaatacttttaattatacaaaaaacggcatgaaaaaaggaattaaacctttaagcttaattccttcttgataaattcaattttttaattaaaagttagccgccttaacgtacatgttacgtccgattcggtaacagcttttaccattaacgcgcatccgtgaaccataggtcttaattggcgtaccttttctaagcactctccagttagcgcggtttcccttgttattatatacataagcattgtgcttaagtacacgtgaattacctaaaacattacttgccataatgtaacgaccattgcccatgtttaaggcagtcttaccattatcaagagtcactacaccataatgagtaatattagtataagctgcatagtagccgctttgacgctcaccctttttattatagatatatgatttcttcatcacatagccagcagttgctgaacccttatcatcatctgatgaagtactcttattcgaagtatttgatgaagcatttgaagagctagcagaattggtgttgctggtagctggagcttgtgaaattgcgccattgttggaagttacattaccgtcaattgataatggtaaaacagcaatatttccatcaacgcttaatcccttccaattatcagtaaattgccaaattgaaacgccattcattgatgggaagtaattgaagtttggactatcaattctacctgaaatagcgtatgaagcgacccacaatgagttaggatacttggcaattacactattagtatcaatattattttgtaaaactgatgaactagcataaagaagtggcttatagcctgcattttttatagtgtccataaaagcaataattgcattagccgttggcgttttaccaccgtaaatgttattgcccgaacctgtttcataatcacaagcaatatatgaacctttaggtaagccgaatgcttgggcagcttgaactgcataatttgcttctgcagcagcagcacttgcatttgaactaaaagtagcaaagtgatatgccattggcatcatattatttgataaagccgttgaaatttgacttgatgccttagggttacgataggaagtaccttcgctaactttaacaattgcaaattgtgctccagcttgcgcatgacttgacaagtcagcgttttgataactagcaacatcaactccaagtgcgcgggctgcaacagaggtagttgcagcgttcacaactgcagtttgtggtatatttacttgtgtcagcgctacccctgccgtaccaagaacagtcgcgcatgccaatctaacaatgatttttttggttgtagtcaatcttaattcctccgataatgttaaaaatagttgtcgttcacacttgtcgatcctattttttggaaatcaattttagaataagctcgttccaaactttagtcaactgattcactaataatgtaagattaagttaataattgtcatatatttgtatcatacaatatcaaatgtaaaaaaatattgtctttgtagtaaaatttagcacatagatacctaaggtatgtaaaaagcctgtaagaccaatgcttacaggcataatttatgatccgggtgagattcgaacccacgacccacagtttagaagactgttgctctatccagctgagctaccagaccatcttgtatgtttgtacgtcctcaacagaacatagactattatagggaaacgttaattaaaatgcaagaggatttttcaaaaaagtttttattttttcaaattcaattaaagtataattgagttaacatagataattattagaaaagagaacaattatggaacttaaagataaaatcaaaaagtttgttactgactttagagatggtgcatatcagcatgacaccaaacgtgacagtggcttgcctcacgacatccctgaagttgaacgtcttgataatctgccttatggtccagatgaaaagtggcatactttagatgtttatttacccaaaaagcacgaagctcccttccctgtcatcatcaatattcacggcggtggttgggtttatggtactaaagaaatctaccaatattatggaatgggtttagctaagcgcggttttgctttcatcaatcccaactatcgtcttgcaccagaaaacgcggaattccctgatgaattagacgatgttgatcgctacatgcattgggttgatgagcacgctgaagaatatcgtctagatcgcaacaacgtttttatcgttggcgacagcgccggtggtcaaatggctgagcagtatgtcactattttgactaatccagattatgccaagttattttcttacaaaccattgaacttaaaatttagggctgtcggcttgaattgtgctgcttccttcatgttaaccccaagcaatttagatggcatggctagcgcctacttcactaaaaatgcagttaacaagtatcatgaacaactcgatgttgaaaaatatatcaatcataatttcctaccaacttttttgattactgccaacaaagatttcttacatgacatgcaatttaccctgtttggcttcttactcggccgcggcgttcatgctatttgcaaatcttatggcgatgaggaaaatccacgtggtcatgttttctttgttgatcaaaaagatgaattagctgacatcgcaaatgatgaagaaattgaattttttagaaaatttttacaaaaataaggacggaaaataatgattaaattttatggttataaacgttgctctacctcacgtaaagcacgcaagtggatggatgaccatcaggtcaactacgaatttcaagatttagttgaacagccaccaaaaaaagaagacttggtaaaatggatgaccaaatatcaagatcgtggtctaaaatatttcttcaatacacacggtcaagattaccgcagagaaaatttgaaagaaaaagtgccaacaatgacgattgaagaagctgcagatatgatgtcaaaaaatggtaagttaatcaagcggccattagtcgttgatgacagtaatttaacttgcggttttaaagaagatattttcgaacaaatttggctataataaaacaagcccataacctgtaactttgtggttatgagcttgtttttatttctttaaatgaatttcacgatcaaacaattgatgcatttcttgattaaagttgtgagcaatgaatacaatcgttgcatccgtcttagtcaactgacgcaaaattttcatcgtagccgcctgatcaattgcacttgttgcctcatcaatcaaaatcaacttactctggtgtaccatgcttctagctaaaacaattttctgcctctgaccaccagaaacattcaattgatcaaggccaatcttagtctcaatgccggccgaaaacttagcaatatctcctgcaaattgaactttttcaatggctgatttaactcgacttagcaattttgaattgaacatcgtaatattttcaacaatcgttactgggaataacactggatcttgcggcaaatagccaatttcagctaaatcaggttgaatcttttcacccttttgattaaagtattgaatcttgccgcgactggcttgcaattcacctaaaatcaatttgagtaaagttgattttcctgtacctgaatcacctgttagtaaaattttctctccagctttaacttggaaatctgggaaagtcacggcctcaccgtttctaaaatcgatagctaaattatggattgaaaaactaaccgcttgttctaaattacttttctgttcagactgaattttctttttagctacaaaaatctcttctcgcaatttctttgttgctcgcattcttccaccataattagcaactccttgcaaagaaccaaatagtgctccattgaagttgccaatgctggcaatcaaaccaaaagcagcccaattatttactaccaaaaatccagttaaaagaaagattagcacatctcctaatgaataagccaattgattcagataatctaattcctgatctactttttccttctcaatatttgctgcttccaagcgtcctgaattttcagcaatagtcttaaaaagcttatcgctagccaaatagcgacgaacttctgataagccaattaaccaatcacctaaagtcttcaaatactttcgattagctactgataccttttcagtagctttttgtaatggcttatccagtaatttaggtaaataaatctgaattgcggcaaaaattaaacaagcaactaacaaactccactgaaaagtcaccaagctaaaggctacaccgacaataccggctagcatccctactacatagcggaacgaatctaaatagtcattatgtaacagtttcaaatcattagtcatccgattttgcactgcactaaccgcatgcttttgactatcggcaaaataatgatctgttagttcttgccgaattaaatgcaggtaattttgaatcaacttttgccaaatgattcccgccaaattatagaataagaataccatgacatagctagacagctggattaatgtccaagttaaaaataaactcaagtttctatttttggcagcatcaaattgcaaagttaacacataatctacaactacttcgccaactgctgcaataatctgtagtcccatagccagacagaatttaattggattaagtttaaataattctttgctactcattattttccctccaagtgaacttcacgatcaaacaatgctcgttgttctacggttaaattgtgtgcaacggccaaaattgttgctctactttgcattaagttttggaagatttttgtcgttgcttgttgatcaattgcactagttgcttcatctaagtacagaatcggcttctcatgcaacaacgcccgcattaaaactaccttttgtttctgtccaccagacagcaattcctgttgtggatcaagctgtgtctctatcccatttttcaaacgcgcttgatcactatcaaaaaccgtcttatgaatcacttgtacagtttttttattaagcttaggcttaaacatagtaatattttcttgaatactgccaggaaagatcaataagtcctgtgccaaataacctaattgacgtaaatcaggtttgatcttttttcctgttttatcgcaatagattacttcacccgtacttggcttaatttgccctaacaaaacttttaataaagttgattttcctgtacctgaatcaccagtcaatacaaccttttcaccattcttcagttcaaagtcaggataagtaattctttcaccatttggatattgtactgacaagctttttatttgaacggtagcgatttgttttaaagaatcataccctttttctggtaaacacttttgcaatttagccagatcatcccgcaaagttttcgttgattttaattgcgtatatctgttcacgcaactatctacactataaaaaattccattggcaaaatatcccgctgtcagaatcgctcctaaatttacctgatgattgaaaaacaaaattccagcaataaatggaacaccaacacgaccagctatattaaatatcgcagacactaagctagtataatgtagcaatttatctcgctgatattcactctgctctagtttctgactctgttgtcccaccacctttttcaaaacaactttattctggtagcgtcgcagctcatctaaacccttgaaccatttttctaacaactgcaaaaattgcttattttggatagaaacagctttagttgctcgattggtatatttttcagtcaatttcggcactactactgcaagcaaagtaactaataatgtatagacaaccaatatccaatgaaaggtaaacagcgtaccaatagttaaaataatataaattaagtcacaaacaaaatagaagtaaacattatagtaactctcttgcactaactgcaagtcatttcccaaatgattttccatctctgagactttgtcttcaggctgctgataataatgtcgtataattcgctgtcttacctgatgaaaaagtgtctgtgtttgtttggtattttgtaaacttccccaattaaaactgacattgcagacctgtccaattaaaaattgtacaaagattaattccaaaaacagttcgaatttaccacttgcaattgcatttaactgcggactagttaagtaggtgtacattgtagttgtcagttgcgttagcgtaatcaaaaacagaactaacattgcccgctgacggttagctttaatataatctcttaaacccattattttcttcattcttttttgacaaaaacgtataatcagcaaaaaaatctctaacatgatttgtcgcaaagaaaaagcactgttctggatgctcacatcctattaacagtgcaacaaataaaggttgatttcgataaagaaaaccaccctcaattcatctactgctaatacttggtatgcaagcaaaaaatgggtgcactaaacaaggtgcaaagacagtattttgctaaacaacaaatcaaatattagagattcagtaaacgaatcatatggcaatttcctctatttctataagttaattaaaactatatcatattaatttaattttacaagctattttttatcttcagctaaatatttttgcaaaactttgaaaacaccgttctccgtattggccggtgcaatatatttcgcctgcttttttaccttgtccataccgtttgccattgcataagaatatttggcaaatttcaacatatcgatgtcattacccccatcgccaaaggcaatcaggtcatcccctgtcatccccatcttttctaggagatgctttaatccggcgcctttattaacaccttgtgtgttaacatcaatggcaaaagtagcggaagcaaaagcagaaatctggttatcgtgcttagaattaaaatctcgttcaatttctgcagccttagaactgtccattccaaatgtgatctgataaatcttatctggtaagtcattccagtcattaattacagtgctattaccagcaaagtaagccaaaaagtcgcgttcatctttttcaacattgctatgcaaatatgcaatatctcggccaaaaaccatcgtagccatttcaccatatttcacatgtacatcatgaattagctttaaaacgtcatcgcgattaagcaaataactgccagcttcttgacccttgatgattaatctcgagccattcaaagttacgaaatccattctgctggcaaacttgccaaagtcctgcttcaatctaacataaggacgccctgaagccacgataaaatgtactcctcgttgttcaaattcagtcaaaatttgatcaaattccttgtgattaaactgcttacgatcatctaaaaacgtgccgtccatatctacagcaactgccttaaatggtaaagtcattttttcaccccatcattattctattttttccaaaaataatcttatcatttttgagcatcctatttcatccgtaatctaccacgttttagtacaaaatagctaattgttaatagaacagtgctggtaagaagaaaaataaaattatcactccaaaaataatgccaacctatttttgttaaaatatctggcgttaaaatttcttctactgttgcatagatataaaaaacagcaaaaaccgatgcaattaaatagcctactccagctaatgagtaaaaaattatgctaatccattttttagtcaccataactcggtttcctagccaaacgaataaaatagccgtcactaatggcaaaacataataataccagaatcccataactatccccctgattaattttggctcattatcacatgcaaaagtaaaaaaacggtaaagaagactttaattttgggcaaaaaaagaccagctcacttcagagctagtcttatctattctattaaactaacttaacgtgcttagcatgcctgttcttgagcttagcccaaccatcgaaaaacaatgccccaaaaagcaaaatcataataattcctgccaaaataatggcattagtcgaattagcaactgctaaactttgggctgaatcaaaatcagcaacttcgtccatttggataatcaatcctgaaaacaacatggctaagccgttcaatgttagcaagccacacagaattgttaagattttagtctttaatagcttcataaaaccatgccctttctttattaattagatgaatattatacacgcattattttataattcaagtaattggattaagaaaaggcacaaaaaatagacatacgttcgcatgcctattactaactttatttattccacaggaatttgattaatactttatctacttttggattctcatgcaacttggagtgacgtgcattttttccagtaaacttcactacctgatagcttttagcacgatctgccactaaatactttaatgacaaagatgatacattgggtactgttccatcggtttgaccaccaatatcaccaatgatgtttaaaacacgaactttatttttcggatatgtttctcttacacccgtcatttgccaatagctagaattcattttgttcggttttccggcagaattcaattttaaacctttaggttgacgaattgaggcgggaacacggctaaagttcaaaccagcaaaatgtcctgccatgccgacttgcttgactaattgtggcatcttccggttacgtccattttgcagcatataataaatgatcgaaatatttcctaaagaatggttcattttttaataccataacgcttttgcagagccttcactacattagtggcgtaaacaccatgtcgagaaaagttcaactcacggttattttcataattgacttctgcaattggatttttggcaccttttttccaacttccactcaaagaaaccttaccgttaggcgccacctcagctctaatcactgagttcgtgactccagctttctcagctgctgccaccatgtgttcttcagtatgatatgacgaaccacaccgtggaaaaataatgtcggtgttgaggtgattttagtctgacttttagtatgatcaaccttattctgattagtacaagctgtcagcgaaattgtaaatatcgttgtaagtagcaagacaagtgaaaacttttttctcatttagcatcccccatttgtttaagttcattttaaagaaaagaataccaaaataaaaatatttttcgcttattaacttccatatctattggttatagccacaattaaaagtaaaatagaaagtaattaaactgcaaaggagaaaaatatgaaatataaccaatacgcttatgtcgaaactgacttcgatcaacaagtaaaagaattaatcgacatcaatttcttacctaaaaattatgcagactggaattttaacgatttgctgggcaagctcgttaaaatgacaattgctgaagcaaaaactgacgctgctaagacaacaaaattatctgaatttgctgtttcaaatgagcaaactttagctgactttttaaaaggaaagcctgaatcaattggtactgctcaattctataatgtagccttacaattacttggctatcatgttcattatgactacgaattagtcgatccaactggctttatgcaaaagaatgctttaccttttgtccaagacatttctgatgtcaaaaagttaatctctgctttttatcgtttgctcaatactcgcgccaaaaacggtcaaattttgctcgatgtaatggctggtaaggggtactttactcaattctggggacaaaataagtttaaatttttcaatggcaaagctattcctgtcttcgataccaacaaagtaattcgtgaagttgtttacgttgaaactgatcttgatactgatcatgatggtaagagtgacttgattcaagttactgttttccgaccagctgaaactaacaaaggcttaaaagtgcctgccctttatactgcttcaccatatttcggcggaattatcgctaatgaaaagcgtaaccataatgttgatgaaaatttatctgatgccgccgattggaatgatccacaatatgttcatgcaccaatagttaaagcaaagcagccagacgactctaaccacccagctaccgaagaagcagtacataaatcttcttatccattaaatgagtatatgcttgctcgtggttttgccagtgtttttgctggagcaatcggtacccgtggtagtgatggggttcgtattactggtgcacctgaagaaactgaatcagctgctgcagttatcgaatggctccacggcgatcgtattgcttacactgaccgtactagatctgttcaaaccaaagctgactggtgcaatggcaatatcgggatgactggtcgttcatatttaggcactttgcaaattgctattgccactactggggttaaaggtttgaaaactgtggtttctgaagctgctatttcttcttggtatgactattaccgtgaacacggtttggtaatcgcacccgaagcctgccaaggtgaagaccttgatttactggctgaaacttgtcaatcaaacttgtgggatgcaggttcttacttgaagatcaaaccggaatacgacaagatgcaaaaagagcttttaacaaaagaagaccgtgaaaccggtcaatattccaacttttgggaagcaagaaactaccgccatcacgctgacggcatcaaatgttcttggatttctgttcacggtttaaatgactggaacgttaagccaaagaatgtttataaaatttggcaactagtcaaaaaaatgccaatgaagcatcatcttttcctacaccaaggtcctcactacaatatgaacaactttgtttctattgattttactgacttaatgaacctttggtttgtacatgaattactagggattgaaaacaatgcttacaagcaatggccaaccgtcatgatccaggacaacttgcaagctgacaagtggcacgaagaaaaggattggtcaaatgaattaggtcaaaagaagacctactacccaactgatgacggcgagcttttccaagatggcaatggcaatgcacaacaatcatttgtcgatgaaggtggcattgaatttaagaaggctgacatctcagaaagcgactggctatacaagttcatctgtggtgatgaaaaatgggctaaaccaagtttgcgttttgaaacagacgaatttattcacccaactacgattgtcggtcgtcctgaagtaaaagttagagttaaaggcagcttacctaagggacaaatttctgttgctttagttgaattgggagaaagaagacgcttaaccgctacacctaagttcttaatgcgcggcggtcaagaacttggctatagatttggcactgatactttgcaagaatttgtgccggacaagaagactaaggctaagttgatcactaagggtcacatgaacttacaaaactataaggacatgaaaagacctgagaagattgatgctgacaagttctacgatttagacttcttgcttcaacctacctactacactcttccatctggtagtaagttggccttgatcatctactcaactgatgaaggaatgactaaacgaccacttgaagaagaaacttatacagttgatttggccaatactgaaattaagttctatgagaaataattttttattcaaatattttcttatattcaccatagccagcctgttccaactgatcatatggaataaatctcaatgctgcggaattaatgcagtaacgtaaaccaccttgatccactgggccgtcagtaaaaacatgacctaagtgagaatcagcttcgggacttttaacttctgttctctccattccgtgcgattgatcgcggtggtaagttaatttcttaattggcttagtaaaactaggccaaccacagcctgcattatacttatctaagcttgaaaaaagtggctcacctgacactacatcaacgtaaatccccttttcataaaaatcatcatattttccggtaaaaggatattctgtagcagccttttgagttacgttatattcctcatcagttagccgctttaaagcttgctctttttcttctttgttaaaagtcatcggatcattcctttgctaaatatgttcagtagtacttggaaagaaattatctattttcttttcataaatatcaaatttatattttgtcaaaaattgatttgatggatcatatattctaacctgaagcatctcatttttgccattcatatgcacttctttatttgaaacttccaaaaatggcttaaatgcagcaatcagattttgataagaactataaacatgcacattatgttcgacaatttctccattacgtgcataccgacgaccgtcgatcacgtatactgtattatcactcatagaaatcatcctctctttggcttctacttatattttaattcattttatatttattcatgacttttttactcaaaaactccaacaattatcatgttggagttcattcaatatttatttaaaattcattaaaatactgaggtcaaaactgcaccggcaacaattaatattaaaccgatcacagtataaataagacctttttgtgtcttcttttcgtgtaagaaaaggataccaccaagagtagaaataacaacacaaagttgtgacataacaaaggctaggtttacaccgttcatcttaactgaaacaatgtatgcaagagcagcaattgcgtaaatcacaccggcaggaattacttgataactttctttttccttaaagacttgtgtttgcttagttgcaattaaataaacaattgctgcaaccaacattccaatggtttcagcaaagaaaatcattacgctgtcacccttcaaggcctttggaatggaacttgaagtaatgtaaccaagtgtagtcaataccagcacaatcattgtagtggtctgattcttttttccaccctcagatgtacctttgtcagtcaatgatgtaaatgctacaccaataattaaagctaagatccctaaaaatccaaacaatttagcttgagtgcttgcccattcaccaaagatcaacacacctacaagtggcactccgatcaactgcaaaccagttgaaattggcatagtttcagaaaccccaaccttggaataactgtaatactgaccaacttgaccaataacccaagcagcaccagctaacattgctaaaataaaagtagtcgcattaaaagatggacgcttaatgagagtaactgcagcaccaaagataaatgcaccaataacggtacctaaaatttggtggtaaatgttactcttcttgacaccagcaacaaacatgggcataagaccccatcctattgccggaataaacagaaataaataactcattcgttttgtctcccttattaatgtaaaaaagttacaaaaagcattctatcaacgaaagcgcttttaatgcaagcgatttactattaatggatgacaagtgcaaatcaatatatatcagaacaccaagagttatttaaattatttttataaaaatcctacggcaaagcctattccatataggaatatacaaattattcccaaatacaataagcaccatttagccacttgcttcaaaattattgattcagatccatcttgtccaattgcagctgaagcaacagctatactctgaggtgagatcatctttccagcagttgctcccaccatatttgaaccaactacccaattactatttacgcctaaagccttagctgaagacaattgcaggttaccaaaaagaacattagctgaggtatcagatcctgtaataaacgtaccccaagcaccaattaacggtgcaactaatggatatattggtcccattagaactactaatgctgccgcaattgctgaagtcattcctgcgtagcccattaccttggctaaagccacaatagaacaaattgtaattaatgttttccacaatccaaaaattgttgattttaagatttgtcctaatttcttgaaactaactttttgaattaatccaccaataaaagtagctagcaaaattaatgttcctggtgaagaaagccaattaatcttaaacagttctgtatctttcccagtatataccttaatataagaagtcacttttcccaatagatgctgaatatctggaaacagtgatgaagcaagaaccacaaatacgaacactaaaataaatggtgaacttgcacgcaaaatttcgatagcgctgtgcttctcaatattctcttttatgtcattatcttgatgatgatataattttgccatcagaactgtagtcaaaatacaacaaattgaaccaacaattgctggtaactctggaccaacaaattttgctaccaaaatttgcggaattgaaaatgacaaaccagacatcagggtaattaatcccactcctttgatagctttaactccgccacctgttagaatcaccaataaaaacggaattataataattaataatgcaagttgtaaagtaataacaaatgataatggagtaacgggcaaattagttacgtcactcagtgtaatcactggtaatccaattgcaccaaaggcagttggtgtagtattagcaattaaacaaattacggcggcattaatcggattaagaccaaatccaattaatatcccagcgggaattgcaactgctgtcccaaaacctgcaattgcttctaagaatccgccaaatccccatgcgataatcaaaactaaaatacgctgatcagtagtgattgacgacaaagtatcttgaataattttaattccacctgaataattgcttacattataagtaaacagtgcagccacgattacataaacaattggccatagccccatcagaatgccctctaaagcacccgtcaaagtgtcaactatagagaggttaaatcccagtatagccaatacgatagtaattaatagtccaatgctgcatgctttaatagcaggcgtttttcgaattgccaaagagtaaataagccaaataattggaattaaagccaataaaaacgaaatccacatttttattcccccctaaacacttcacttccttatctcagattataaatgtattcgcttacgaaagatagtgaaatactcttactcatggctctataataaagtttgtgatacatatttttttcacaatatcttgattgaatgctatctatcgtttatttatctcagaattattagctcacttgtgaaaataattttttgcataaaaaataatgcattctcctacttcaatagagaaatgcattatttttatctattcaactatcctacttcaaagcatcagtagcaaatgatctattctccaagctagtaagcaaagcatctgcagtatcaagtgctgtaattaatggtacattttgaccaatggcaacctgtctaatgatgaagccatcagaattcttttcaatatcgtgacccatcgtattgataaccaagtcaatcttgccatttcttaattcattcaagatattatccttggcgtcttcatcttcatgcactttagttactggatcaacatgcaaattatgactgcgcaagaaatcagctgtacccttagtagcaaagattctgtagccaatccgcgcaaatctcttggcaattggtaaaatcttttctttgtctcgatcttcgatggtaagtaatacattaccattttcaggcaattgcatcttagcacctgcaaaagctttgtagagagctttggcaaaagtgtgatcactccccattacttcacctgtcgatttcatttctggcccgagatatgcatcaacgtccgataatttgctgaaggagaagactggtgctttaacagagatcatgtctggctctggggcaagaccatcaccgtagccctgttcagccaaactttcgcccataattactcgggtagcgacctgagccatttcaatacccgtgatcttgcttaaaaatggcactgttctacttgcccgagggttaacttcaattacgtaaacttcaccatctctgacaatgaattgaatgttcataatgccgacacagttcaaagtcaaagcaagctttctagtgacatcagtaatcttttctttaacttcatcagagaaggtttgtggtggataaacagccattgagtcaccagagtggacaccggcatgctcaatatgttccatgattcctggcaaaagaacttccttaccatcactaattgcatcaacatcacattcacgaccatcaagataatcatcaaccaagattgggtggtctgctgcaatatcaacgtggtcttgcaagtattcttctaactctcccttggtgtagacaatttccatcgccttaccacccaaaacataacttggacggactaaaactggatagcctagcttatcagcagcttcaagtacgccttcatgagtagttgcagttaaaccttgaggctgattcaaatgaagttgcttaatgatttgatcaaacagttcacggtcttctgcacggttaacatcagctactttagtgcctaaaatcttgacgccatgttcttctaagccatgagccaaattgattgaggtttgaccaccaaattgaacaatcacgccttctggcttttccaagtcgcagacattcaagacatcttccaaagttaatggttcaaagtataatttatctgagatagagaagtcagttgaaacagtttcaggattagaattgataacaattgcttcgtagcccatcttttgcaaggccttgacacagtgaacagtcgcataatcgaattcaacaccttgaccgattctgattggacctgagccaataacgatcaccgacttcttaccagtcttatgtgattcattttcagcatcataagttgaataaaagtatggtgtctttgattcaaactcagcagcacatgtatcaaccatcttgtagactgggatgatgccatgctttttccgaaatgctcttacctcatctgcagtttcattccacaaagaggcaatcgttggatcactaaagccatatttcttagctaagcgcaatacatcaacatcatctttattttcctcaagtgtcttttccaattcaaccatatgttgcacgatatctaaaaagtagaaattaatcttcgttaattcatgaacatcttcagctgaataaccacgtctaaatgcctcagctaaatagaagagacgatcatcttgagctttgactaatttttgctctaattggtcatcactagctacgtgtgcttctggtgagtaaagatctttttcatcaatttctagtgatcttaccgctttttgcatagcttcttctgcagtacggccaattgccataacttcaccggttgctttcatttgggtgcccaaaacgcgatcagccttagggaacttatcaaatggccagcgtggtatcttgcagactacatagtctaatgcaggttcaaattctgcataggttgttcccgttactgggttcttaatttcatccaaagtcattcctactgcaattttagcagccatcttagcaattggataaccagttgccttagaagctaaagcagatgatcttgaaacacgcggatttacttcaattacatcataattaaagctatttgggtcaagagcaagttgaacgttgcatcccccttcaattttcaaagccctaatcaaacgcagtgaacaatcacgaagcatctgatattccttatcagataaagtttgacttggtgaaaagacaattgaatcaccagtgtgaatccctaccggatcaaagttttccatgcagcagacaatcattgcattgtcatcatggtcgcgcattacttcaaattctacttctttatagcccgcaattgatttttcaatcaaacattcagttacaggggaaagttccaatccatttttggcaatctctgctaattcttcatgattattacagataccaccaccggtaccacccattgtaaaggcaggacgaacaatgatcggatagccaatctcatctccaaaagctaaggcatcttcgactgtattaactgtcttagaaggtggaactggttcacctaatgacttacataattccttaaatttttcacggtcttcggcttgttcaatagattgcagcttagtacctagaagctcgatgtgtaattcatccaaaattcctgttttggcaagttccatagccatgtttaagcccacttgaccgccaagtgttggcaaaatagcatcaggatattcttgacgaataattcgtgaaatcgattcaactgtcagaggttcaatgtacaccttatctgcaattgttgtatcagtcatgatcgtagctgggttggaattaactaaaactacttcatagccttcttcgcgcagagccaagcatgcctgtgtaccagaataatcaaattctgcagcttgaccaataataattggacctgagccaatcaccataatcttatgaatatctgttcttttaggcatgacgctcttcttcctttctctgatcaatcattgacataaagtcgtcgaataatgaaacctcatcatgaggacccggtgttgcatcagggtgaaattgcactgaaaatgcaggatatttcttatgacgtaatccttcaaccgtcccatcattgacttcaacgtgggtaatcattaagttatccttgtcaattgaatctgcagacacagcataaccatggttttgtgaagtaaaaccaatattaccagttgcaatctctcgtacagggtgattaaaaccgcggtgcccaaatttcatcttgtaagttttagccccattagctaaagcaaagacttggtgtcccatacaaattcccatcaaaggaacatgcttttctacttcacgcaccattttagttgcctctaccatttcttctggatcaccagggccgttactcaaaagaacaccatctggatgaaggtttaatacttcttgggcagtagctgtatatggtaaaacaatacaattacaatcacgttctgctagttcacgcaaaatactgtgtttaattccaaagtcgataaccacaatattgcgtttcgaaccaggaactggatatggtgacttggttgatactcggctaattacaccttgagttacattcttagtctttaattctgccgcaattttttctgcattttcttttgaatctgcaatcttaccacgtaatgtaccgtgaactctcaattttttaactaattcacgcgtgtcaattccctgaatacctggaatgttcaaatgctccaaaaactttggtaaggttgtctgcattcgccaattatcaggatgacgggcaacctggtgacaaattacgcctttgatccttggctcaagtgactcataatctgccaaggtaataccatagtttccaattaaaggattagtgaaaaccaaaatctgatcggcataagattggtcggtaattgcttcttgataaccagtcatccctgttgtaaatacaacttcaccaactgtttcgcaatcagcgccaaaaccctcgccagcatagatgctaccatcttctaggattaaataccgcattattgttcatcccttctgtatacaacctgaccatcaaccatggtcattacagtttcaccatacaccttgtcgcccgtaaatggtgtattaacgccttttgacttatagtcttcttcttttaattcagtttcatggtctaagtcaaaaatcgcaatatcagctggcttacctggttcaagtaccccggcattttttaagccaaacgttttagctggtttatcggagagccatgataaaagctgctccaaggtgaagactttttcttctttgacaaatttagtatataaagtagaaaatgctgtttcactaccagtaataccaaaggctgcgcccttcatgccaccttctttttcattgcgagcatgaggagcatggtcagtcgcaattaaatcgattgtaccgtctagtagtcccactagtaacgccgcttgatcttccttatttctcaatggcggattcatcttataataaccgttgtccttaggaatatcgtcatctgttaataaaatatggtgtggcgctacttcacaggtaacattgattccacgcgccttagccattcgaaccagttccacactagttttagttgatacatggcaaatatgataatggacgcccgttttttgtgctaaaagcaagtctctagcaatttgcgttgtttctgctaattcagttactggcggcaagtttaattccttggctttaggtccttcattcacgatccctttattaaaaagcgaatcgtcttgtgcatgagtagcaatgatcaaattattttccttggctttttgcattgccaaatacatcgtttgagcagtttggactccatgaccatcattacttaaggcaaaagcacctacctttttcaatgctgcataatcaggaatgacatcagtagtttcatcattagtgattggtccatattgaaaaatatgaaccacacctttttcattgttttcttgtaccattttttgcattagctcaggcgtattaggtacaggcgttacattaggcattgcccctaccatagtaaaaccaccatgagcagcggcttcactaccggttttaatatcttccttgtaagtttgtccgggatcacgataatgaacgtggacatcaaccagtccaggactaactagcttgccacttgcatcaatctctttatctgccgttaagttagtccctattgctttaatcttttgatcttcaattaaaacatctgctttaattagacgaccattttgataaactgtgccattcttaattactgttgccattattctaatcctccaagtcgtctaccgcgcaatactgcctcgatcattgccatacgcatgaacacaccattttgcatttgtctgacaaacatgcacttatcgctttcaactaaatcaccgctaagttcaacatcatggttaattggacccggatgcatgatgatggtgtcgggcttcaatgcactatagcgttgatgattaataccatatttttcgtgatatgctttagcattaaaagtcttttcattaggatcgcctgcatgacgttcatgttgaacccgtaagagtatcatcacgtccatatttgaaactaattgatcaatttcttcatacttaccatattgatcgaattctttatcataccagtaacttggacctgagaagtaaacttcagcgcccaacctagtcaaaagttccatgtcactttttgcaaccctagaattagtaatatcaccaacaattgcaacctttaagcctttaaagtggccaaaatgttcatgaatagtcatcatatcgagcatacattggctaggatgttgaccgctaccatctccagcgttaatcacaccaatatttaaatgttgatgttcttttaagttaatcaaatcattgtaatactcattctgtgagtgacgaatcacttctaagttgacacctaaggcgttcataattaatgaagtgtcatataaggtttcacccttattaacagacgaatgagccggatcaaaaggaataactgtcaaacctagttttctttcagctatttcaaagctcgtatgtgttctagatgaatcttcaaaaaacatattagttacataaactggcttagttaaacgtggtgttgcaccgccttttttgaagtactcagctctcctgattaaggcttctacttcattactatccaaattttcaacactcacaaaatgtggtaaattaacaagatttaaattttccattttctattctttctatacaaaaaagcctgaagcatttaattgctccaggcctagagtcttcccgtgtacacgaaaagaaatcaacccttctggccctctctggagtcaattaaatggttggatatttaactatcttctttttattttggtaaagccttcagttcaactgaatctttgccgtccttatcaattacattaacagcaacctgttcatcggcagaagttggaatatttttaccaacaaaatcagcacgaattggcaattcacggtgaccacgatcaactagcactgcgactctgattgaacttgggcgaccaacgtgcatcaaagcatccatcgccgctctgattgttcgtccagtatagataacatcatcaatcaaaacaacatgcttgtcatcaatattaacaccaacttgatcagaattgacaactggatcttgctttaaactagcatcatgacgatcatcccgatataaggtaatgtccaattcaccaactggtacatcaacgccttccaatttctgaatacggtcatgaattcgtttagccaagtaaacgcctcgcgttttaatccctaccaaaaccaaatcatcggttcctttattttgttcaatgatctcgtaagtaatacgggttaaagcacgcttcattgctagtgcatcccagatttcttttgccattatagcctcctaattctgcccatgaaaaaagctcccaatctcaactgagactaggagctttagtaaagtcgaaacttaagttaagcctgccttgctagcctcacgggactaattttaaaggacattcattgctttaaagttactgtaattagaaacgtttgtcaagctctaattaaattttacttgaccaactaattcattgatatcttcaatgcctaatttttcaagttcttgcggcaaggcatctgcaatatgcttagaagcaatactatctttaaaatgagcagtaccaaccgctacggcattagcacctgctaacataaattccaccacatcttcggccgaagcaatgccacccatgccaataattggcaaagaagtaatttgacgcacttgactaatcattctaatagctattggcttaacagcctcacctgataaaccgcccatattatggcctaacagtggtctgcgttttttcacgtcaattcgcatccctagcaatgtattgatcatcgataagccatcggcaccacccttttcggcagctttagcaattacagtgatatcagtcacatttggtgttaacttcacataaattggaatattgacaactgctttaatttttctagtcaattcttcaaccacatcggcatgcacgccaaagctcattccaccttgagccacattaggacaagaaacattaatttctaaagcattaaccaagccagaatttgacagcttttgtgctacttcaacataatctgcttcactatcaccgccaacgctagccacgatcggtaattctggatattgctttctcaatggttctaacttttcactaatcaccttttccacaccaggattagtaagaccaaccgaattcaaaaccccatcatctaaaacgtcaatctgtggttgcggattacctgtggttgcatgtggcgtagttgtcttaataaccattgctccaagatcatttaagtcaaacttcttagctgcaggcacatcgccgaagccaaaagttccacttgctggcataactggatttttcaaatctaaacctggtaattttacatgtgtattaaccataattttcctccaaaatgaatgctcacggacactctttattttttcaagaaatgattctacacgtgattataattttttccaagcaaaaattttatttgtatttttacttttgaggtgttaaacttcaccttgatcaaactttaaacggtacagagagaccgcaagttcaaaatattgacttaaattatctaggaaaagtctatccttggtgtctctctgcgctaagatagactttttttgtggaggaaaaatgaaacctgtaattgttgcattagatattgacaatgaagagcaactgcataagattttgtctaaattaggcaaaccagaaaacgtctttatcaaagtcggtatggaattattctatcacgctggcaaccaagtggttaaagacttagctgagcaaggttataagattttcttggatctaaaattgcatgatatccctaataccgtttataacggggctaaacaattagctaagttaggaattacttttactaccgttcatgctttaggcggcagtcaaatgatcaaatcagctaaagacggtttaatcgcgggtacacctgctggcaaaagcgtgcctaagttactagcagtaaccgaattaacttcgatttctgatgaagtattggcacatgaacaaaattgcgcactgtcaatgaaagagcaagttctttcgctagcaaaaatggctaagcactctggagcagatggggttatttgttcaccacttgaagtaaaagaattacacgaaaaagttggcgatgactttttatatgtcacaccgggaattcggcctgctggcaatgctaaagacgatcaatctcgcgtggccacaccagcgcaagccaaagaatggggctcaagcgctattgttgttggacggccaattactttagccagtgacccagaagctgcatatgaagcaattaaaaaggagtttaactaaaatgcataaggatcaaattatcagtcaacttattcaagaaaaaattatcactatctcacctgacaaaccattcacttacgcaagtgggatgctttctccaatttacaccgaccttaggttaacggtttcatatccagaattacgcgatatgattgctggtgatttagctaatttaatcgccaaagaattccctgaggctactattattggtggcgtcgctaccgccggtattccccatgctgcatgggttgcagataaactacacttaccaatgatctatgttcgtcctaagccaaaggaccatggcaaaggccgccaaattgaaggccgcttcagtaaagatgataagatcgttttaatcgatgatttaatcaccactggtggttccgttttaaatgcagttaaagcaactgaaaaagatggcggcaacgtcattggcgtttcttcaattttcacctactacctaccggatgcaaaagaaaactttgctaaagctaatgttaaatatgctccgcttctttcctaccctgaattactcaaaaaggaaaatgagtcaggtcatatttctagcacgcaatatgatgtcttaaagacctggcacgaagatccatgggcttggggcaaacaattcgaaaaataattaagccaaaataaagaccagtttcagtttgaagctggtctttatttttttgttttaataccaagctggcttatcaccgtcggtatttggtttatttaaaccaacattaccacgactgtctttactttggtctttaactatttcatttacataactagccacacttagacgagagacctcagttcctttaaatggggtagttgcgccttcagttatttcatagtcaacttcatctttattggtcaaccaagctggacgaataatcgtgtaatccaaatcgctagcagtaatttgatcagcagctgcacgataagtggtcaaatatgaacctaaaatattcttgttccattcaccaaatttgcctggtacctcatcatagactcctaacgaggaaatccaaatcaaacgcttaataccatcttcatccatagctttaacaactgtcttagcttgatcttcaatatttgaaccagctaaattagcataaacgatatctgcacctttaatagccggagcaagttcatccaatttacttgcatcccctacgacaatcctttcacgttgatcatcgatatcttttttatccaatttattaggatggcgtaaaaataaaattaattcattatttttatcttccaaaaataaattttctgctaatttagcaatttgtccacttgcaccaagtactgcaattttagtcatttttctttcctcatttctatcaaaatttaacttacaattacatagtaaaacttatattttgtaagtcaacgatttaccacagataacctgtatacaagtttttagttttattagttgcaaataatataaaaaataaaaaagttgtaaaattatcttagttaggagaaccaaatgaatagaaactgtcaaatcttttgtgtaaatagttctttctcgtaaattgattttttaattatttatttaatcaaagtaggattctaaggtgtcctgaacctgaccaaagcctttatgaattcgattgaaataacggtcattgtagctcattgcctggatgccaataaatgcatcaagcgactgttcagttggaaattctgccttaggcttagctttacgcttgatgacgttgttaaaggattcaatcatattggttgaataaattgaagctctgatttgtttgggataattgtagaagactagcagatcgggctcaatttccttcaaacctttgatgacatggctataagctttattccatttggcatagaatttgtgcaagacagctgcagcttcttttttgcttgtctgttgatgtatctgcttgaattcgttcatgatcttttcacgatcgtcgacgcgtactttagcgcagatattgcgcatgacatgaaccaggcagcgttgaaaatgagctttaggataagtcctggccaaggctgttttcatgccaacaacaccatcagaaagaaaaagctcaacttgcttcaagcctctggacttcatgttttgaagcatctctgtccaaacttcaatgttctcactaggagcaatgcagtagtcaatgacttccttatgtccattaggtttaatgccaatggcaatatatactgcttcacgctcaaacgtttctcggcgcaaaggaaggtatgtcgcatccaaatagacacagaaaaacttgtcgcttagcttgcgcttgtgataagcctcaatcttggggagcatctgcttggaaatatttgatacttgagctggactataatgactgccatacattttctcaatcaagtcagcgatttctctggtagttacgcctttggagtatagcttgataatcgtgctttccaaaacatcagagtgctgcttgtagtcaggcagcgtgtgctgatgaaattgaccgttgcgatcccgaggcacttgcacttcaattgggccaaattgcgtatcaactttgcggaaataagcaccatttctagagttgccagtattccagccatttctggcatagggatcatagcccagaaaggcagtcaattcagcttctaacaagttattaacagcctgttgtagctctttgcgcaataaatcatttattttgtctggattgaatagagcttgagcaaaatctttggtaaaatcattcatgaaggagttcttctttctgtatgtgtttttttgttcaaaccaatcatacgagaaaggaactcctttttctaatgtttaaagaaataaatttaaggaatcattcatccttacacaaactattttacagtctccaaataaacactggtcattttaagccaggtcatcttttatcagaaaatcaaacgcgtattaaacttaacatgtctcgtactccaattagagaagcaatcaaacaattggaaaatgaaggcttactagttcgtcaaggacaaaaaaaatcgttagccatattacattagctgaattaaaagacaattatgatttacgttctctattagagagttatgccttggaaaaaaattttcccaatttagatccacaactggctaatgattatggaataaaattccaagaaattttagcaaaacatgattggcaagcttatcttaaacttgatgaactattccatgtatttttaactgaaaataccggaaatcccacgcttcagcgaaccatcgatcttttacgtactcaaaccaatcgtatgcgttatgccatcgtagacaatgatcgttgtatgaaatcctcggttcaggaaataatggatattatttctgcagttgagaaaaaagatattttgttagcctctaacgctttaaagaagcatataaaaaatgtctatgattgggaacaacaatttttacaaaaataagatcattcatcaaaaacataaatgccttttttgctatattttgttaggataaaaaggatgtatcgtctgtaatatggggaaatgtaatgattaaaaatgcaaaacagattttagcaaaaccttttttcaaccaacatgactaaaactttggttcaagcaatttcagttgggctaactactggagttatagttagcgcatttcgctggattattgatcaaactatgaagttgctttatcaaatttatccgcaaatggcagcccagcgagtactgatcgtaccctacatcttattgatgttcattattgcaataacattaggtaaaataactgcgccttaccttgaacaagtaattggctcaggggtaccacaaatcgaggctgttcttttaaatgaaaataagatgccatggtggtccattctttggcggaaatttattggaggcttattagctatctgtcctggattaatgctaggtcgtgaaggtccttgtattgaaatgggcgcaatggttggtcaaggattagcagaaaaagtatttaaatctaacaaggaaaatttgagaacgctacaataatgcggtgtggctgcaggattggctgccgcctttagcgcgccaatagctggtgcacttttcttggtcgaagaaattacttttgattttaaacctcaaaaagtagtagccgtcttggccgccactttttcagctgacttcgttactattctagcctttggaaacaaaccattcctttatttacccgttaacgattatttacctttaattggtatctttttgggaataatggcatacatttatcaatatgtactactttcgctaaagccatggttcagtaaaattaaaaaaatccctgcagcctatcacagtatcattcctttaattttaatcccggatttaaaattgaagtgcaacactaagtgttaaacaaaaaggccatgaagacctaaacttgaagtgacgaaaaatcaagaaaggaagatcttcatgaccaattcaaattctagcatttctaagcactatcatcaattaaccagcgtacaacgtggacaaattcaagcaatgctggattccggcataacttcccgtactgttatcgctcaagaagtcggctgccataagtcgacaatcagtcgcgaaatcaaacgcggaagtgtcctgcaaagagacagcagctatttattgtatgagcactattacgctgatactgcacagatttattatgagaagcgtcgcaaaaactgctatcagcgcaatccattgaagcattatgctgtctttttgagaatgctctccagacgctttaaagctaaatttgatgccaccagcatcgatgaattcgttggtgaattcaaatgccaggctacccttgtcccagcacaccaactgtctatcgctatattgatcagggcttgctggacataagcaatattgatctgcctatgaagctcaaaagacgcaggaacaagcgtcatcacagccatggcggtcacgctttgcacaagaagcatcttggcaattccattgaacagcgtcctaaagagattgaagacagaaaagctccgctgcactgggaaggagatctggttaaaggcgtcagacgcaagaatcagcctgctttaatgactttgactgaaagaaccacacgctttgaagtagttatcaagattcctgactatcgggcaagcacatgccaaaggctgcttcaaaaggagattgacagacatcctgcctggtttaaatcaatcacgtttgacaatggctctgagtttgcggatatgaccaagatcaagggctgccagatttactttgctcacccatattctccatgggaaaggggcaccaatgaaaactgcaatggtcttttgcgtcaattcttccctaagggcaagagcatgaaagacaagtcaaaagcttatgttcaacaggcaactgatgccattaaccacaaatatcgccgaatcctccaatatcacacagcagaagaactcttcaagcaatatatttcctcatagcctaactgttgcacttaatttgacaattcaggctttaattttaattattccagttggtctatttaatgcccacttactcggtggttcacatgtgttaattgataatttattcaatttgaattggaatgtcaaagcctttggatcatgggactttttttactaccgatcttattcttgataattcggtttgtcttttcaatgctttcatatgattcttccgtacctggtggtattttcatgcctatcctagttcttggggcattattgggaataatttgcgccaatattatgataaaattgcagattattttgccaatgtacttccctcatatcctagtgatttccatggccgcatattttggtgcaatagaaaaagcaccattcacagcaattatgctactgactgaaatgattgggactgtccagcaagtattgccaatgattattgttactttcgttgcttactacattctggacattttaggtggaaaaccaatttacgaggacttacgcttgcaaatgaattatcataaaaatatgtcaataatttaggaaaatgtcccaaaattatttaattattagcggagaatttgctctccgctatttttatacgtattgatggtatttatgagctctcttttgttgctttatgaatgattctcgcttccatggatgtgacattggtggaatccactttttcttggtccttttctttttaggctcttggtctacttctggcgatattttggcattcttaggaatttctttaagcagatatacatgctcatctactgtcgttagcagttgtccatctagggcttcaattaccagacatttagttcctttcatgaagcagactaatttgccatattcatctgttgcttgataaagcttgtttttgaaagaaatagctgagccgctatcaaacactctgccagtgagaacggccaaggtataattgattttgcagtcatcaggagccttttcaaaaacataccaggctttacgactagtctgactgaagttttggttaaagtcaggaacaaacacatcatgcaggtatttatttgcctcgttgattgtcatgattccagccaatcttagttctggcttaaggcgaccttggacggtttggttagctctttcaaccatgcctttggcttgagaaacactagtagtttttagatctacgccaagagttttgcaggcatagccaaattgtgtcagcacatctttatgggcagctttggtttgagcagtctcataattgaatacagtccgattatcagtcttaaagcaaaggggaatgccatattccttaagaatttgctcaaagacgtgatagtagccattcaaagtctcttcccagtcaaaataagccccaacaataatgccagtagcgttgtcgattgcaaggtgcaggtaagccttacgcttaccaaaccagactaagacagaagcatccatctgaatttcttcgccgaagtacttgcatctttcatggcgaggatgagcatctgccaaagctagttgatgatcaactgcagcgctgacttcttgtttgctttgcttagggtgctgcttatgccatttctttttggctaaggcacgcttagtctttctccaaggcttaggggaaagaatatcctgctgcttgagcaggctgtaagctttggtataagagacatgaatgtcctcaaagcgatctaacagctgtacaaaatgttttatattgcagtcttgatatttagtacggtataaggttacaatttgattgttaatttctgtggtgagacaattaacaggtttgcggtctttgttcccatgaacgaaggccgcttttcctttagcttgatactgcttgattctcctgtttatttgtctaacggatattcctagcttcaaggctgctcttttcttattgccgttgtgatctacaagatccttaatgactttgtactgttcatcatatttcatagttaaatcaatcctattcactctaactataacctccaataaaggaaattatgtcatacttactacaattaggacattttcctaagttaacagttaagacattagagactgtcaagaagtttgtgtaaataatctctctcgttgattgacttttttatttatcttttaatcaaaataggattctagggtgtctcgaacttgcccaaatcctttatgaatcctgttaaagtaacggtcattgtaatccattgcctgaactccaataaaggtgtcaagcgactgctcagttggaaattctgttttaggcttggttttccgcttaagcctgttgttaaaggattcaatcatgttagttgagtaaattgaagctctaatagctggcggatagttgtaaaaggttaacagatcaggctcaacctgtctaagatctctaactacgtttttgtaggctttttcccagttttgatagaattcatgcagcacctgtacagccatttctttgtttgactgagtatgaatctgcttgaattcatccagtgcttttttcgatcgtcaacccgcattttggcactgatattacgcatgacgtgtaccaagcagcgttgaaaatgcgctttaggataggactggcagatagcctctttcatgccaactactccgtcagacaagaagagctctacctgttcaaggccgcgcctcttgaagcctttgagcatttcgctccaaatctcaatattttcagtaggcgcaatacagtagtcaatcacttctttatgaccattaggtttgataccgatggcgatataaactgcttcgcgctcataagtgacccgcttaagaggaatataggtggcatcgagataaacgcagaagaacttatctgacagatgtcgctgatgatatgcctcaactttgggaatcatttctttagaaatattggaaaccatagctggagaataatagccgccatacattttctcaatcaaatcagcgatttctcgggttgtgacgcccttggaatagagcttgataacagtttgctctaaaacatcagtatgccttttataatctggcatagtgtgttgatgaaactcaccgtttctgtctctaggaactttgatttctatttgtccgaattgcgtatcaaccttgcggtaataagcaccatttctagaatttccggtattccagccatcgcgctcataaggattgtagcctaaaaaggcagtcaattcggattcaagcaggtcattgacagcctgttggagcttttgtctaaataaatcattaattttatcctgattgaatagagcattagccatatctttggtaaaatcattcatgaaggaatctcttttctagtatgtttttcgttcaaatcaatcatacgggaaaaggattcctttttctaatattcaggaaaataaaattaaggaaatattcatccttacacaaaatattttacggtctctatcttgaaactgtcaaatcttttgtgtaaatagttctttctcgtaaattgattttttaattatttatttaatcaaagtaggattctaaggtgtcctgaacctgaccaaagcctttatgaattcgattgaaataacggtcattgtagctcattgcctgaatgccaataaaagcatcaagcgactgttcagttggaaactctgccttaggcttagctttgcgcttgatcacattgttaaatgattcaatcatgttagtcgaataaattgaagctctgatctgcttgggatagttataaaagaccagcagatctggttctatgtctttcaagcttctgataacatggctgtaaaccttgccccatttggtatagaagtcatgcaggacagctgtggcttcttctttgtttgtctgttgatgcacctgtttgaattcgttcatgatcttttcacgatcgtcgacgcgtactttagcgcagatattgcgcatgacatgaaccaaacagcgttgaaaatgagctttaggataagtcctggccaaggctgttttcatgccaacaacaccatcagaaagaaaaagctcaacttgctttaagcctcgggatttcatgttttgaagcatatctgtccagacttcaatgttctcgctaggcgcaatgcagtagtcaatgacctccttgtgcccattaggcttgatgccaatggcaatatagactgcttcacgctcaaatgtttctcggcgcaaaggaaggtatgtcgcatccaaatagacgcagaaaaacttgtcgcttagcttgcgtttgtggtaagcctcaacctttggaatcatctgcttggaaatatttgatacctgagctggactgtaatggctgccatacatcttttcaattagatcggctatttccctggtggtcacgcccttggagtaaagcttgataatcatgctttccaagatatccgagtgctgcttgtagtcaggcagcgtgtgctgatgaaattgaccgttgcgatcccgaggcacttgcacttcaattgggccaaattgcgtatcaactttgcggaaataagcaccatttctagagttgccagtattccagccatttctggcatagggatcatagcccagaaaggcagtcaattcagcttctaacaagttattaacagcctgttgtagctctttgcgcaataaatcatttattttgtctggattgaatagagcttgagcaaaatctttggtaaaatcattcatgaaggagttcttctttctgtatgtgtttttttgttcaaaccaatcatacgagaaaggaactcctttttctaatgtttaaagaaataaatttaaggaatcattcatccttacacaaactattttacagtctccaaaaaactttcttaatcttctttattattcgttataattaaaaacagaataacttacaaagcagggattaaaatgactaatcggtataaaagtgtttttgacattattggccccgtaatggtgggaccatcaagttcacatacggccggagccgtcgctattggacgcgctggttacaaactttttggcggtaccccgagtaaagttaccgttcattattacgactctttcgcccaaactcaccgtggtcatggaacagactatgctattgcggcaggtattttaggctttgactcagacgatctacgcgtaccaaaggcacctgagattgcacgccagcgcggcgtagatttacgttttgttgaagaagatggtcctagcccaattggtcaccctaatactgctattttaaatatgtctaatgataaaaagaaagtggaattggctggatgctctatcggtggtggtgcaattgaaattcgcaaaattgtcttacataataccgagattcaacctgctggtgcattacctattattattttagttgatccacacaaaaatattcgcattgaacaagagcttaccgcgctcttacacgaaaaagcaccctttagtcgcaaacgaatttttcatactaaaaactataatatttatgaatatgatgtagaaaattatcttcatcctgatttattgcaagaactaaataaaaaatttgagaatattatttgtttataacatagggcaatattatgtataaccatattaaggaaattgttgctgcagcagaaaaaacgcacaaacctatttctgaattaattattgaacaagaatgtcaactatcaggcttgccacgagaaaaagtctggcagcgcatgaaatataacttgcaaactatgcgagctgccgttaaaagaggtgaatctggaaacggtgtcttttcaaaaactggcttaactggtggcgaagcaattaagctgaaaaaatatcgcgagaaaggacacacactttcaggcgatacaatgatggcagcagttgaaaatgccatagccactaacgaagtcaatgcagcgatgggcgttgtctgcgctaccccgacggctggttcttccggcactttacctggcgttctatttttattagaaaaaagattacagctcagcgaagagcaaatgattcgctttctttttactgctggcggttttggcatggtgattgccaataatgccgaaattgcgggggcaactggcggctgtcaagcagaagtcggtagtgcctcagccatgggtgctgccgcggcagttgaagtagctggtggcagtgctgaacaaagtgcccaagctttatcgattgcgatgtctaacttgcttgggttagtctgtgatccgattgccggtttggttgaagttccctgcgtcaaaagaaatggtattggcgctggtaatgcacttatcgcagctgatatggcgctagcgggatgtacaagtgtaatcccagctgatgaatgtattgaagcaatgaagaaagttggtcatcaaatgccggcatctctgcgtgaaactggaatcggcggtttagctggtacaccaacaggtcaagcaattaaagcaaaaatttttggtaaagatgcgtaggtaacacaatgcgtgatagcaaaacaattaaaaacgatattattgaacatttagctcaagttattgacccagaattaaacgtcgatgtggtcaacttggggctgatttatgaaattgacctcgatcaagatgggatctgtctcatcaatatgacattaactacacctgcctgtcctttgactgattatttgatcaagcagattacaacagccgttaaaaaagtccctgaagttaaaaatgttgatgtagaatttgtctggtatcctgtttggacccctgaacggatgagtgatgcggctaaagaatacttcaaaatacaataaaaaagtctaggctaaaattttgcctaggctctttattactttccaaattatttattcaaataggccacaaacaattcagtatagatcttcacaaagttcaaatacatcttttcatcaacatattcgttaacttggtgcggcgtgtcattaccgggaccaaacatggcaaacggatagctaggtcctttgtcggcaatcaaattcgaagcatcagttactggtttaatagcaactgttggaatcggcttttccgcatattttgctccaattttttgggctaattttacaaattcagacttaccgtcagttttaattgaaggttccgacatatagatgtacattttgattttagctccttgcgcattttctgccttaactaattcagttaatttcttttcaaccaaactattattgaactcaggaatagtccgcacattaatttgcgcggtagcctctccgggaatcatgttgacctgttccccgccagtaaaaacagtagtattgaacgtcaacttacctaagtctggattgtttttatctgtttctctaaaagccttgttggccttaactaataaatccattaatggatcgatcgcattataacccttttcaggcattgagctatgagcttccttgccttgggaagttaacttagtatccatcgaacccttatgagcaatggcaatactgtagccagaaggttcaccaaccaaaagtagctagcagcctgatactaccatgcttaattaaatggtgttcatgaatattaatcatggcaataaccaaggcagctaaaccagacttcatatcagtcgctccgcggccgtacaatttaccatccttattggttaatttaaagggatcagtatgccattgatctaattcacctggtgaaacaacatccatgtgaccacaaattgctaaaatgggatggcctgttccgatttcagcaaataaatctgcgcgagttgtggaatattccaacaaacgtgaactaattccatgttctcctaatagtttttgtaaatattttgctactaaaatttcattatcattaacggattttattgcaacaagatcactcaagattttaagctcttcagtatcagtcaaaacattattctcttcaataatttaattttcctctccaaaaatcgaatcgctttcaccttgattgtagccgctgagttcttgatagtaaaaaaatatgactatcatttattcaatgacaatcatattgaaaatattaattatatttttgctttatcttactgaagcaccagttgtggtatcagtctctggttccggagctggctttccttctaacttagaagcaccagataccgcatcagtttgcttaacttgattttcgtcagttaccggatattccttgcgtctgcttggatcagtattagatggcaaattatcagcagtataagcaatgtgcgtcaatttagcatgcttaacatcatcaattgtcttgcatcccgttaattgcatatcaatctttaattcatcatttaattgttcaataactgaagcaactccatgcgcaccacctaaggctaaaccataaagatatgggcaaccgattccaacaatgtcagcacccaaagccaaagctttaaagatatgagagccacgacggacacctgaatcaaagataattggcacccgatgatttactgcttgcgcaatttctggcaaaacatcaatggtagcaggagcaccatcaacttcacgaccaccatgattagttacgtaaattccatcagcaccggctccaattgctttataggcatcttcagcacacataacacctttaacaaagactggcaaacctgattctttcttaattcttttaacatcttcaggaccaatcttttgcgcagaagaagcgtacatttgagctacgctttgacctttaccttttgcaccaaggtaacgcttaaagaagtccaatggtacaggataagtaaagttagtccgcaagtttgcttcacgataacctgataccaaagcatcaacggttaagaaaatgccttgataaccagcttttttaattgcatcaaaaaccatctgattaaaattccagtctttactcaaataaagttggaaaaaccttggtgcttctggagctgcagctgcaatttcttctacactcttattagcataagtactagaactaaagagcgcaccagccatagcagcacccttttgcgttgcgacttccgcatctttatgtgcaattccatgacaagcaattggagcgatcataattggcgtctttaagtgcatccccataaaatcagtatcagtttgcggatcagccatctcagtcaaagcacgaggtacaatttgaaaatgattaaaagcagcagtattgttacgccaggtccattcattttctgcacccgaagcaatataataatatgcaccttctggcattaccttcttaacacgttcttcaagttcatccacattcaccatcttgattttttcatcgcggtcactttgtggaaagccttcgtagtagtgggtcattcgtttttctcctctcaatatatattgtatacgcgtggtgctagttaaatcgttttagttaataaaaaagtccaatcttgttagactcaacttgtataataatagaaaagagcctgatctgattgaactgccttaagcttaagcgttttagccaccatttacaagttagttttaaagatttagtgataatttgtcggcactggtatcgtttgtatgcaccggctgagtttactcatcggcgaaatattgatcaaattaaaactacggacagtctgattttggctttacttatctggcaagctaagacaggaattgaatcacaaagaagattctgtgaatgtttcaattgtttatcacactcacgttttaatcgacgttcacgtcagctattgcaattgatttatcagatacggcaagaaatgaataaaaaggttgacctgaatggacatttcttgatcattgacagctttccggtacctgtttgccaaccaattcgcaactatcgtgctaaaatttttcgcggttatgccaacattggttataaggccaccaagaaaatttacttctatggtttcaaagttcatgccattgttagcgatgacggttacattcttgattatgtcgtaacaaaagcatcagttcatgatgccaaggagacagttgaactgctggaaaatgcccatccatctaattactatcttcttggcgacgaaggctatttaggcaaagaactgcatcaacagctaaaacaaatgggttatgaactttggacaccatatcgtaaaaatatgacaggagctaaaaagcacaatgatcatcaattgatggctattcgcagaacaattgaaagcgacttttcgcttctgacctattacaatgccgagaacaatcgagcacgtagtctgataggctttcaaagccggttggaaattgcaattttagcttataatttggcttattgtctagaaagatttaactagcaccacgcgtattgtatgttaatttcattatagtttgtaagcggttttgttgcaaattgatattctaaatttatatatgatcaatcaaatttatatataaattttagtaataaaaaaatatctgtgagactgtaaaatagtttgtgtaaggatgaatgattccttaaatttatttctttaaacattagaaaaaggagttcctttctcgtatgattggtttgaacaaaaaaacacatacagaaagaagaactccttcatgaatgattttaccaaagattttgctcaagctctattcaatccagacaaaataaatgatttattgcgcaaagagctacaacaggctgttaataacttgttagaagctgaattgactgcctttctgggctatgatccctatgccagaaatggctggaatactggcaactctagaaatggtgcttatttccgcaaagttcatacgcaatttggcccaattgaagtgcaagtgcctcgggatcgcaacggtcaatttcatcagcacacgctgcctgactacaagcagcactcggatatcttggaaagcatgattatcaagctttactccaagggcgtgaccaccagggaaatagccgatctaattgaaaagatgtatggcagccattacagtccagctcaggtatcaaatatttccaagcagatgattccaaaggttgaggcttaccacaaacgcaagctaagcgacaagtttttctgcgtctatttggatgcgacataccttcctttgcgccgagaaacatttgagcgtgaagcagtctatattgccattggcatcaagcctaatgggcacaaggaggtcattgactactgcattgcgcctagcgagaacattgaagtctggacagatatgcttcaaaacatgaaatcccgaggcttaaagcaagttgagctttttctttctgatggtgttgttggcatgaaaacagccttggccaggacttatcctaaagctcattttcaacgctgtttggttcatgtcatgcgcaatatctgcgctaaagtacgcgtcgacgatcgtgaaaagatcatgaacgaattcaaacaggtgcatcaacagacaaacaaagaagaagccacagctgtcctgcatgacttctataccaaatggggcaaggtttacagccatgttatcagaagcttgaaagacatagaaccagatctgctggtcttttataactatcccaagcagatcagagcttcaatttattcgactaacatgattgaatcatttaacaatgtgatcaagcgcaaagctaagcctaaggcagagtttccaactgaacagtcgcttgatgcttttattggcattcaggcaatgagctacaatgaccgttatttcaatcgaattcataaaggctttggtcaggttcaggacaccttagaatcctactttgattaaataaataattaaaaaatcaatttacgagaaagatctatttacacaaaagatttgacagtttcatatctgtaagagcttacagcaaaagttgtataataaagacgttgacactattactgcaagaacttacttaaagcagattagtggcattttctttattgcatgcccttactggataggttgcactgcaaaaattaagaaaaagaggcataatttatgaaaaaaattttagcgattaattcgggtagctcttcttttaaatttaagcttttcacctttcctgatgaaaaagttatcagcgaagggatggctgatcgagttgggcttaacggctccacctttacaatcaaggttaaaggtgaaaaacaccaagaaaaagttgacattcctgattccgaaactgccgttacaatcttgcttgaaaatttaaaaaagtatgatttaattgacgatcctaaagaaatcatcggaatcggacatcgaattgttgcgggtggtgaagaatttaaggactccaccttaattgatgaaaagtcactacaaaagatttatgatttgaaacaatatgcgccgcttcataataccgctgaagccgatgtcattaatgccttcatgaaagtattgcctggcgtccctgaagtcgctgtctttgatacttcattccaccaaaccttggatccagtgcactacttgtactcacttccatataaatactatgaaaaatacggtgcaagaaaatatggcgcacatggcacttcggttagatatgttagtcaaaaagccgctgaaattatgaaacgcgacttaaaggacttgaaattaatcgtttgtcacttaggatctggtgcttcagttaccgctgtgaaagatggtaaatcattcgatacttcaatgggcttttcaccaatggcgggtattacgatgagttcccgttcaggtgatgttgatccttctttacttgcttttgtcatgaaaaaggaaaatcttgatgctgatcaaatgcttaaggttctaaacaacgaatctggtttgttaggaatttcaggcatttcaccagatatgcgtgatttacgtggtgacatgactaagctcgaaggggaaaagaagaagcgtgctgacttagctagaaacattttcattaatcgaatcattcgctatgttggtgcttatacccttgaaatgcgtggcctagatggtatcgcctttacagctggtgtcggtgaacacgactttggtgtccgtgaacatgtcatggattcactcgaacttttaggccttaagcctgattcagccgctaataaagaaaatgccaccattattaccaagcccgactcaactattgttggtatggttattccaactaatgaggaattaatgattgaacgtgatgttgtcagagtagctggcttaaagtaaaaaatagagaaaagaaataagacgaaggacaaaatccttcgtcttattttgcgtattaagccattgctttttcttttcgttcattatatgcgtaataaatccaagcaataacaccaaaggccactggaccaatagccgtccagaatgaagtttgccagtctccggtaaagagtggttctatacaagtaaagataattccgaccgcaaccactaaccaaacaacaattgtcgttgcccaaacttttttcttaccttcaataaaaacaaatggccgatctaagtcttttttagctttaaaaaatgggtaagcagcaattaaaaataaatatggtgctgatgaagaaacattcatcatatccattaaaattgtatagaattgttgtgctccattaccaccaaatgaaataaataagataataacgctaaccacaattgcttgtacccacatcgagaattcaggcatattgtgcttatttaacttaaccattttcttaggcaatagtcgcggatcacacccctcaataaatgatttaatcggtgaataaaccatcaaaaaggcagcggcaattcctgataacacatccgcaattccggccaaacgagaaaagacagttccaattgccagtgaagtagaatgtgatagacctaggctatgaccagtgacaatacctaaattattaatcaaaacatattcgacattagctaagtcaacacctttaccacctaacgatttgttccaattaacagccaccccacacataaagatgtttacaacataaagtgctgtcattaagaccatggccgtaatcagagccttaggataattcttttccggtttatcaactgaatcaattactcctgaggttgtttccagaccaccataggcaaataaagcatagacaataaatgaaataaccgcaatcggtgactgaaatgctggattaggtgaatgaaccatattttgtgcggtcactggttcagctaattgcccatgattcaaaataaagacaaaaagtgaaactgctgtaaaaccaatggcaattcctaaagtaaagatcccaccaatattattaatcgcctttattttatcaattccctttgcggcacaaaatgtaacaattactaagaaaataacttccaacacacctaataactgagttgaagtcagcgaccctaaatgccagcttggggtagtatcatgaccaaaaattgccgttgaaactgaaactaagaaaaattgggttgatgaaactaaccaaattacccaagctgccagccaaataaaagttccgataaatgatactttttcattagtagatccttcaagccatgaaaagattccacctttaattcctttaaaggaagcaccatattcagcgaaaattaaggctgatggcaggaagaataaaatagctgtgacaatataccaaatgatacttgaataacccatttgataaaaagctgtcagtgaattactaaatccaaaaatagaagaaaaaatcatcaagacaagactactaggacttatcttaacgtgatcattattcttcataaaaaataaaacaactcctttaacataaacaaacaatttctattatgaacttttatcatgatattttcaaaaagagcttttgcacacaaaaaaagcaggcctattcggtctgcttaagtaattaatcataatcttctggattaatatcaggtttaggtaaatctgaattattattcagcactactccttgaatgccattttcataggtccaatcttttaacatattcattttgccggttaaataatattgactaatcagcttgttccatctatcccacttatcaagtggggcattaattaaacctgctccatggtcaatcattaatttatttgcagctagtgtggcagtacgcttatttccgccccagaataattgattacgcatattatgatacatcaatgtcattgccttatctgtagtcgaggtatcgttgttcattaactcatcgaaaaatttttcttcttgtttgtagtttagattatctcggaagccatagcctgtcagtaataaatgtatctttagttcaatatctaaagataacaccttattttcattaataatatattgccatgctcgttttaatcgaataattctttccttatctttctcggaagccctctctatatttaacccatcagcaactaattgtgtttgaattaaagaaatatttgttttctcaaaatgcaaatcactaaatattagtcgagcaaggttagttctggcaaatcttctatttaaatcttgtgttaaatagaatttatctgggtataacatatttttacacctattatcttatcctctgcctcaacaattctggcctttgcgccagctctgcgtataaatgacgaccatttatgctaatcccctcaaattcacgccctgtatgaaagtgacctctagccagcactttacctgagcgtttcaatttaaacaaataatcattaaaggccaaataaatctgttttttatgcttgtcataggtaattccttgaacgggagaatcattgcgcataaaatctcctctagtagcgccaatctctttaggataccaactattaccctgacgagtaacttcccaatattcaaaacggtggtctgtggcatcatggtaaacggcaataaattggtgatcatttacaaaagtagcattatggaaataacgacctgttctagctgaatgattccaaactttaaaagtccaaatctgtttaatttgcaaattgtttttactaatctgcataatttcttctgattgagagctcttgcgcaataaatggttattagcaatcacataaatatactttcgagttgaaccgattgcttgtccatgtcccaatttaatatatgggcttatcttaacatgggatgcaagccgcagaaattgtgaccaaggtagccatggcaacttttgcatagtatagcgattaggcacttgattaaatttgtaagaaacaatgtgagcacgcgtatcattaggtgaatgatacattgtggcatacattgaaccatttgacacggtcaatccttctggtactagtcccaccgtcccagttaccgaatcactttgacataaagtcgcaggttgatagaaataggttttcagtttaaaatgaacactttttaaaacatgcgatttagtttccggcgcaaaacttctgccccaattaccagacgtcttatagtgcttgaaccagctacgagcactgtctccagcttgtggttttttggttgctttaacaatgccctctctagcattagctctcacttgaacaactgtctgagcatgagctttaccataagaataacttacccgatagctttcctttttacttgatgaaacttctgctcgagatactttaactttacttggctcaattatcgttcctgctgcatctgttgcataattaatcgcatccctagttggaaaactataatgcgaattcttcactaaactaatctgatgtacaactgcaatttttcttcttaaaaaagctcgctgattgacccaaccgcctctatgtccgtctaaccaaacatagcaatacttattgccgcgaacttttctaactgcactggcttgaacattgccatgtttaaacgtattagcaaggcatagacttcttgacggacctttacgagttaagttttgataaattctataagacgtatgcggattaatcatcttagtctgaaatggatttagttctcgcgcccaaaccatttgcggcttcaaacataataacgtcatcaaacaagctaatcctaaatagacttttactctcttcattcttatttttacaactccctaaaaataacgcaaagtctattgtaggtcagtgagtttttttatcaatattattattattaatttttagatcaaaaaagcgtaaaggacaataattcatcctttacgctacaatttttattaactttttctagttttgaacaattaagttcttcaaatcatctgataattgaactggtgcgtacttaacacttactactttaatagtagaggtctttaagtatctcttcttaccaatataagcatatctgctcttaccgtttttaacgatcatcgatgacttgtacttcttaccgtacttgatcttcttcttggttgccttaaagtaaacctttttagccttagcactcttcttatatgcgtagtagatctttgcacccttttttgacttaggtgaaacaacgatgtactttaatgctctattgttgtaagcatcttgaatggcttttttgtcactttgtgcttgctttgaccagtctgcttgacttggaactgttgctgaaggggtaacatcagtcgaaacaacataaattgcacattgttgtccatctacagtttgactgtcaacataatagaaagtaacagaaccttgatcgttcttagcctcgttagaaaagtaaagctggatggtttgacctttagtataatttgaatccattgactttacgattttaccatcttggtttacagcgtaaagcttaggattagcattattaactgtagctgatactgatctacgcttaatactaatggtaccttttttgcttgaagtttgtgtagttgctgcatgaactggttctgcagcagacacacctgcaccagctaaaccagctgaaagcatcactgcggcagctaatgaagtaaataaattcttagttttcatcgatataatctcctaacgtaatctcttatagttaaattataacattttttattattcgtcaaggtaaagatacgttccccatttcaccggctcttgtttacttggctgaattgcaaaatacagaacaaaaatccaacctaacggtatcagcattaacagaatccaccaacctgtataattgatatcatgcaatcttcttacggctaggcctaattggcataatttcaaataaagatagatcaagccccaaataatcataccgataatgacaatcatcgaagcgtgatcaccattaaaagcaaaaccatttatcatatcagctgaatcattctcatagtgagaaactggcataacagttgccaaaaatgtaataattccaccaatccaaattataacttcagtaataacgattccaatccagaaacttcttctggtagttcttgcattccagataaatggtcgcagaaaagtttctttcataatttgatcaaaactaaaaactggggcctcaccatctaactttctttcaccctggtattcttgtttgtaatatggctcgctcatcgcttattttcctaattccacataaattttgacagctgctttaatagtttgataaacagttgaaacatgcaaagtatgagctaaaaattcttccttctcggctctagtcattgccgaatcaaagaagaccttgatcttcatctcagttactactgatttaccatgaccgagattctccgtttttgcctggttttctaccctaaaatttttaacatcaagttgatgtgctttagtaatcatccctgccgacattacaatacatgaattaacactactacatagatactcaactgggttgggacctgcatcatgtttaacatcatcacaaacaaaaacatgatcacgtacttggttggcaatttgccattctttatcttctaacttagatttaactacatattcgctcatattttccctctaatgatggtcaattgcgccattcaaacgcttacgccaaatgaaataaactactaaaatcaatggaactaagactaattctactggatagaaccattctatcggtaaagcagaatcaattacaccactgatcattgggccaaaggccatcgcaatgtctagtcccaaataaaaggtagcactagctaagccttgttcttcaatcggtgctaacaacagcgcagttgattgcaaaactgaataaatgatcccatagcctgatgccattaaagctgccgctaaagccatttgccaatcattattcattattgcgagcaagataatataagcagccgttgaaactagacttagccaaaaccagacgccaaaacgtactgtatcaaaatacctttttagtcctactctaataatcaacaaaacaaccgcatagatcaagaaatatgacccaactgcgacagtcagatgtttttgttctacataagttacaatatctgcctgtgttacaaaatacgggatagcaaataaagttgtcaaaattgctaccggtaaaacattaaactggataattttgaaactcttcttctgcgttcgaactcgctttttaggcaaagcatgatcacccacaaactgaatggccacaatcattaataaagcagaaacagctgatgctagcaagcttgtgcgataacctattttttgataaatattaattgaaactgctggtgctaacgccattgccaaagcattcattaagccataaaagcccattgcttcaccaacgtgttggcgcggcactaaaaaagcaagccaggtagtcatacaaactgtgcacaggacataaccggtgccgttaattaacctaaagagcaaaagccaaccacttgacggagtcaaaacgtagcccattactcctacaaaaattaaagcgccgccaataaacgataagcggtatttagaaaatttatcggttaaattgccagctaccggtcgcaaaaacattgctgctaaactcataatcccgacaatgattccagcaaaagcactgctagcgcctaattctttagcatatccattaatcaaaggattaacaaacattgtactaaacataaaaaagaaagatgctgccataaccaggacaacatctttggtataaattgattttctcttcgccaaaatgatcccccaattctgttctaattatacaactatcacagaatgatcatttagcaatttttaaactaacagtaaaaacaatgtcttcacctttgtggtgggctaaaattttgccatgaaaggcttcgactaactcttgcgccatagccaggccaatccccaagccacctttcttagaattatgcgactcatcatcgcgataaaaacgatcaaagaaatggctgtaatctttgcctttaccttcacgataggtattttctacccgcaagaccgcatatttgcttaaagttccgcccttagtcagtttcacctgaatcttgccatgaggatcacaatatttttgcgcattatctagcaaaatattaactacttcggctaaagtatgcttttcagctaaaacatttaagccttcccgcaccgatacttggtagactaagtcattcttcttcatgactgatttaaaatctttagtcgtttcttcaacgatttctgaaaagctaactttgcttaaggtaagctcacccgtctcgccagctcgagccagcgaaatcaaccgattgattaacttagttagtttagccacctgctctttattgctttcattccattcagaattattgcccagcatttcttccatttccgtattcgcggaaataactgctagtggcgtttttaattcatgaccggcattggtaataaattcctgctgcttgtgataagcatcaatcgttggcttaattgccttgcccgaaactaaaatcaaaactaaagcaaagacaatcaaagcgcctaagcctaaaactaacgctactctaaataataaccaaaaacggttaaaaatcagagtttcattcaaaaaaacaatcatcatttcaccagtagaattttttacaaccctaaaggcatattgattttgtcctaaggcaactacaccacttttatcaccattttctaaagctgatctggtaatagtctgtatcttggaattattaattttataaacgttattatcattaattacatgtacctgatggctttcatcaattgttaccgcaaaatagcgatactgataaaccgcttcgggattatactgcccacctaaaaaattgcgattaattggatcatgttgatcgccaaaggctggtttggcattttttggtgacaagcgcccttcatttttgaccaaagccgttagcacgcgatcgacttcattttggctttgaacatgagtcacccaaactaagccgcctaacgtcaacaacaaaactacaaacaaggcagcaacagaagtaccaataaacttccaccgaaatttttgaatcatctgctcacctacttaactagcttatatgaaccacctttatcgccttcaattcgaactgagctttgaattgattgcaatttttgccgcaagtatgaaacatagatccagactacctcgctattggcatcaagatcatttttccaaacatgattaagcaattcttccgttgataattccttattttgatttaataaaaaataatcctgaattgtcaaattaagtgcaacagttaggctatgaaggaacgtattgcttgaagagttcttctgctgtgtgatattggaggattcgacgatgtttgcggttaatggcatcagttgcctgttgaacataagcagctgacttatctttcatgcttttgcccttagggaagaattgacgcagaagtccattgcagttctcatttgtgcctctttcccaaggagaatatggatgagcaaagtagatctgacatcctttgattttggtcatatccgcaaactcagaaccattgtcaaacgtaattgatttaaaccaattaggatgtctgtcaatctccttttgaagcagtctttgacaagtactggcccgatagtcaggaattttgataacaacctcaaaacgagtggttctttcagtcagtgtcattaaggcaggttgatttttacgtctgacgcctttaaccaaatcgccttcccagtgcagggaaacttttctgttttcaacttctttaggccgctgttcaatcgaattgccaagattctttttatgcggagcatggccaccatgactatgatggcgtttgtttcggcgtcttttaagcttcattggcaggtcgatattgcttatatccagcaatccttgatcaatataacgatagacagtgggcgtgctaggacatggataatttggcataatcctgtgaaattcaccaacgaattcatcaatgctggtggcatcaaatttggctttaaagcgtctgcttagcattctgaaaaagacggcatagtgttgcagtggattacacttatagcagtttctgcggcgcttttcatgataaatttgtgcagtatcagcgtaatagtgctcatacaagacatagctgctgtctctttgcaggacactgcctcgtctaatttcacggctgatagttgatttatgacagcctacttcttgagcgatagcagtgcaggaggttatgccagaatcaagcagagcttgaatttgtccacgttgttcgctgttcaattgatgataatgcttggaaatgctagaatttgagttggtcatgaagatcttcctttcttgatttttggtcacttcaagtttaggtcttcatggcctttttgtttaacaattagtgttgcacttcaattttaaatccgggatcctttttattctgaattatttgaatatctagccttttatttacaggaaaaaggatacgattgtattcttcatctagatcactatcaatcccaagatattaattactatttagagcgatttaaacaaaaggaaatcgctggactgatcaccagctctcctattaagattcctaaaaaaggactaaaaataaagtttcctattgttagctttgaccgtaaaattagtcctcaaataccaactgttcaatctaataactatgacgcaggtatgcaaatcgcacaatctgttctaaaacaaaagaaaaagaaaattattattattgctggtgctaaagaagactattacccaataagtgatcgaatcaaaggaatgattcgcgtatttaacacttttgattctaaattcgatcttcgctcactcagtgccagtgactcaattattgctaaaaaaatagccatccttcaatttttaaaggatgacaaatatgatgcaatttgttgtaccgatgacattacagctttactagctaaagaatgtgctgattatttaggaaaagtacctttaatcacaggatttgatggtagtcatttgattcaaagtctttttccaaatttaattagtgctcggcaacatacaaaagaaattgctgaattaatgtgcgatttacttttacgtcaaattaatgatccctctgtttcattagaaagtgtttatacgctacctgttagtttaataaatcaaaattaaaatcaaaaaaacgctagaatgtagcgatctaataatcatacattccagcgtctttttataacatcttatgctttttcattctctgttcgaaaatcccgttaatcaactctgtcatttgttgtttttcttctgcggttggttcaccatcttcaaaagccttgtataaatcgggatgttctctagcgattaacttgcaagtgccttcaacagcatgcttgcgaaaaatttttggaatcttgtttagatattcttccttgactaaagcaataatcttttcgtttgtcatcatttttactatacctttcagttgatttctaaatattttaaatattaatatggatttacttgtaaaatcaaatcataatatccaaagaaggaaacatccctaccaattcattcagtaaggatgttctccatatttttattcaaatttccaatcaacagtccgcttaaatttttcacctggcaaaagcgtgatgcgtcccaaatcatcaccttctgctggcggcacttgtgcttcaaaagtaatcccgcaatacggaccaaagtcagctgtatacttgccagtgtggtcaaagccattaccagtgtacagaatcagagatggcgcattagtcgttaccgttaacttgtgtttagcagaagttagcactgcatttggcatattgccatccaagataaatggatgatccattccatcgcggttcttaatttgcggatcatcagcttccaatgcatccccaactcgcttcttctttctaaaatcgaatgctgttccatcagctttttccataccacgatcaggcaagccagtctcatcaactggaatataataatcagcattcatttgcagttgcaagtcattaatcattttcttttcacctaatgtgaagaaagtatggttaaccggattaaaaatagtcagcttatcactcatggcacccaatgaataatgcagaatattgttattatctaactcataacgagcgtgtaattttaaattaccaggataagcattatgcccatctggatcaaaaagtgttaaatcaacacgagcacctttttcattacaactaggtctaaaattccaaatttcagtatcagtcccaataccaccatgaatgtggttaggcccttcattgattggtaattgatgtaattctaagccgtgccgccataaacctcgtctcactcttccggcaatacgtccaaccgtaccgcctagataattacgctccttgtcgtaatcttctggcttatccagtgacaaaatcatattctcaccatcaagcaacaccttttccaatgtagcaccatagttcaataccttaactaccataccgtgatcattctctagtgtgatttcacaaagatctttattatcttttctgccatattttctaaaacttgtcttcatactcttgcccttcttttgtattcgctttcataaatattataaattatttaaccatcagaatatatgagttaccgctaacaaaaaaacgagatcaaacagatctcgttttaaacattgatgagttaaatctgcttagttaaagcggtaatgaacttatcccagccttcatcgccatctgcattattcttgaaaacaccagcatcttgcaatacttgttcaaagacttcaactaaagcttgctgcatcacagcgtcaacattctcggcagtaatattctgctctgctttaatttgatcggcccattctttgtggctaatagccatcttattatcttggcccaaccagtattttttaacttcttcaagttcactctttaaccgacctggcaaaatagcacggcccattacttcgatcaagccaatattttcctttttaatatgccacaattctttatgtgggtggaaaatacctaacggataattttcactagtgttgttgtcacgcaaaactagatcaagtacgaagttcttgccttcacggtgcataattggagtcacagtatgatgacgtgttttaccatcaaaagccttaatttgacgagcagaatctgaataatgatcccagaaattaataattttagcgcccaattcaatcaaatctaacgaattatcgctaatcaagcgcaagtcgctcattggccaatcaacaatgccagcaaccacttcaggataatcatcaaagactacatttttcttaatcttagctttcatcattggaaaagtatgacgtccgccttgatagtgttcatgtgctaacattgacccaccaacaattggcaagtcagcatttgaaccaacaaaataatgtggtaacgtcttttcaatttcaaccaaattaatcaaagtttgttggttgatgaccattggaatatgcttttgatctaagaaaatacaatgttcattgaagtaagcatatggtgaatactgaaatccccaagggcggccaccaatattcatgcgaataattctcaaatttgaacgagcatttttgccatatccaccaaggtaaccctcgttttctaggcaaagtgcacattgaggatatttcttaccagttgcatgagctgctgccgcaattgccttaggatccttttccggtttggacaaattaattgtaatttctaagccatgtcctttagagctggtccctgagaatacaacattcttggcaattgcttcctttttgacataattgttgttttcgcaaagtttataaaaccaatctgttgctttttcaggtgatttttgcattttttgccaaaagatgccattagttttagatggtgttggcgttatcaagtcgtatagttgatcattcaaaacttcacgtgaagtaacatcatccgaaatctttttattttgcacggctaaatcaactaattgcttaactgaagtttgttcatcattagcttcaacgctacttgcctcatcgccaactaaagcgcgaattttgttaatcacatatacgcgatcgagcggctcatacgctccactattaataacttcatccgcaaatttttcaataactttcatacttatcctcttgtctgattaaattctcttagttccatcaacaatttccgcatcatagaagctggcatcgtaaccgatcttgtcgcggtaaatcttgccaacatttttcttaaatgcctcagcttggtctttcttgacgattgcaatggcactaccaccgaagccaccgccaatcattcttgcacccaagacgccaggttgagcccatgaagcttcagctaaagtatctagttcttgaccagttacttcataatcgtaatgaagtgaaacgtgtgaagcatcaatcaaacgtcccaatttttccaaatctccattttgcatggcctttgttgcccgcaaagttctttggttttcactaacagcatgacgagcacgcttaatttcagtttcattattaatcagatatgcatattcatcaaaagtatcattatcaagctcacctaaagtcttaatatctaacttagcctgcaacttcttcactgcatcatgacattcacgaacacgatcattataagcagaatcggctaaggtatgtggcttgttagttgccataataataatttcgtaatcgcctaaagcgagtggcttatactcataatctaatgtattgcaatcgaggaagatagcactatcttttttacccataatgcaggcaaattgatccataatccctgaattcaagccaacaaattcattctctgttctttgacccatcttggctaaagcaatccggtcaacatctaagttaaattcatcctttaaaatgatgcccattagcatttcaatggcagcacttgatgatagccctgaacctgatggtaaattggctttgatataaagattaaaaccatgatcaatgttgtcatatttttcacgtaagtacgtaatcatgcccttgaagtagttagcccaaaagcgatcatctttctcaacagttgtgtcgtcaatatcgaattccacgatatcgccatcaacattgccagaaaacaagcaaacttttttatcctctcttgggccgtaaacaccataaacacccaaactaattgcagctgggaaaacatgaccaccattgtagtcagtgtgttcaccgatcacgttgattcgaccaggtgagaaaaagacatccttacctttttcaccaaaagttgtctcatattctttaagtaattcttccttattcattgtttttacctcaaatttattctgtaatcgttttcagttattagtatatctcttcattatcttttagtaaatagtttacttaaataaataaaatatttatttaagtaaaaaaacaagaagctagatcgtttgtctaacttcttgtcttcattaaggaaaaaatcatttatttaacaagtatttgtacatcccatgccttcatttgatcatgagcttgctgaccagttaaaatattttgatactctacaaatttttgtggcaattttctttcttcattactcatatttaaaacaaagtataattcttgcccagactgagtaactcgcttagtaacttctaacttatgactgtcgcccaccaatgattcaacgttagctgtcaaaacaatatggttgaatagctgcgtcaacccaatgtgatccaacttagtaccaacataccaggccttaccttgaccatatttattttccgtgactgcagccgttcctgcataaaactcattggagtactttgctaaaacttttgcattttctggatgaatcaagtcacaaaccaaacccgctttataatccttgccatttagtgaaacaattgtcttatgtcctggtacaattgcatcactttcttcaacccaaatacccataacgtcttttaacgggccaggatagccaccaagatagacattatcactattgttaaccattccagacatataggtagtgacaaagttgccaccatttttgacataagcattaatttttttgcttagccctgctttaaccatatataaaacaggagcaactactaaatcatattgactaaaatcatcatcgacactaattacatctgtcggaatattgcgttcataaaattggcgataataatctaagattgattccatataattaaaatcttgactaataccgtcaacgtactcatatgaccagaagttatcccaatcaaatacaatagcagctctagccttagttttagagcctaaaacagttgggccaatcttttttaattttttacccaaatcttctagttcatgaaagaccctcgtgtcggttctttgtgagtgggcaattacggcactatggaacttttctgagccgcctactgcttgttttaattggaaaaactgaaccgtatctgcaccatgagcaactgcttgcaattccgtggctgccatctgccctggtcttttcagcgggctatatggttgccaattgacttgagacggtgcagattccatcaacataaatggctgatgctttaaactacgcattaagtcatacaaaaatgctggtaaatacttaggtgcatcgtaggttgggtaagaatcataagaaataatatcttgatctttagcccatttttgataatcaaccatcttatttggtaaaccatggaaattagtagttacaggagtgttagtatcatactttttaataattgatttttccatctgaaaaagattttgtaaactatcagattgaaaacgtaaataatcaattgataaaccggcaacaatggtttcgctaccttctggtccccaggcgtctcctaactcattaggaacaacaatctgatcccaatcatgaatagtatggctccacacattcatattccaggcctcattcaggttatctagtgtttgatatttactcttgagccaagtacgaaaagcattttgacaattttcacagtagcaattgccgccatattcattattcacatgccaaacagcaatatgaggtttattactatatctttcggcaattttctcgactaatttactagctaaaacttgataattcttactattggggcaaaagttatgtcgtgcgccaaagacatgccgccgtccttgataatcaactcgtgctacatcaggatattttttaaacatccaagctggcatcgcagcagtagaagtagcaagtacaatatcaaaatttgcatcagacaattcttgaataattctatctaattttgaaaaatcatattggccttctcttgactcaagcaaactccaagaaaaaacattaattgtagcagaatttaaatccgcttttttaaaaactttaatatcttctgaccaagtgtcttctggccattgatctgggttatagtccccaccatataaaaaacgttttaactgtgtcattgtaattcctctacttaaattgtacatctaatactttttcaccatgctcaacaatcttaccagcttcaatttcactagattttacaattcgtcctggttgtgtatagaaggtaactacagtgtcctgatagccattcttaagagctaaattacgatcaaactctaacagcaagtcacctttttttaccttttgaccatcatcataataagtttcaaaaccttcaccgcgcaagttaactgtacctaagccgacatgaacaactacttgtaaaccattatttgaaacaatttcaaaagcatgcttagtaccaaaagtgaacctaactacaccatcaaatggagcataaatattgcctgaatctggtttaattgcaaaaccctttcctgggaatggcttaccatcttcgtcaattacttctgccatcttcattaacttaccgtctgcaggagcatagatagtctgatcttgaggtctaacttgagtattagattcattcttttcaatcttaccttctgcaagttgatcttttaattcttcaaccacttcggcatgtttcttttcagataaagttaccttagtcaaaaagactacgattgataagactgccaaagcaagtgggatatataatgccaccatattaaaggtgctaatatcatgagcagtcatgtctgcagcagttgcagaaccggtcatcccagcagcaattgcaatataaccaactaaagcattagaaaccgcaccggtaaacttatcaatcatcggccgaacagctaaaacaacagcttcatttctttgaccattcttaagttgtccatattcaattgcgtcagttaatgttaaaacagttaccaattgagcaaagttaatgtttaaaagaaccaagcccaagtccatcaaaaatacgttgtctctgccgaaaataaacaaaacataagctaaaaccatgcaagtttgtccagcgatgaataaccattttcttggaatgtatttgttcagaattgggaacattggactaatacagaaaccgataattgttgcaataacaccaactacccagaagtcatttggcttaccaataacgaatttatacatatagaacaaaacaccattggtaattacatatgctaatgagtaaagcaagtatgctaaacttggccataaaatctgatcgttatggaaaatagcaccgaatacttgacgtaaagtagtcttttgcttagctgagtttctaataatattatgcttttctttagtaccgaaacaaacaatcaaggcacatacaattgccaaagctgaaattactgccgcaaatgctaaccaacctggtgcaccttcctcatgtttaccagttaccgcataagtcacagctgtaactaatggaacaacaataattgttaatccgttccaaccaattgttcctgaaaaggcacctaaagaagtataaataccacgtgcatgtgaatcttcacttaaagctggtaccatgccccaataagaaacatcagataatgaataaaatacatcaaaactgatataaattagtacaaataaaatcgcaaagagaatccaacttttttgtgctaatccaaaaatgccagtaaacaaaactaataataaggcggcacttactaaagtaccaattaaaatccaaggtttgaatttgccccatctagttttagtattatcaactatatttcctagaataggatcaattaccaattcagcaattctaattacaaccatcaatcctgtaattaagccgatcagcttatctgcaacggactgattaagtccgctgaacatgctgctagtaataaaaataataaaatatgtactcatcacaccataaaaagccgagtgacctaagttacccaaacagaatgatgcgtaggaaagaatctgcttccctgacttgtcactgtgtgtcataaatttgccccctaaagcaatcattaattgtaatcgtttacacagtttagtatattctctatttttgttaagtaaagaatttatttatatttaataaattctttactgaaagctaaacaaaaagagaacgcattaaattagcattctcttttgatagtattactaaaaaatatttttatttactaattaatttacttcttaggcacaaaactcttgcgcacaactaaattagtattcatatttacatcaatgtgtgcccgattaggttgaataatcagattcgttagcatatttaatgccatatcaatcatctcttgttgatcaatattataagaagaaagtggcggtgaaacatacttaaccacattactattattaatacttaaaattgcagtatcttttggcacattaacattgttctcattaaaagcttgcaaaactccaactgccaaagtatccgaagcaattaaaaatgcatcaggcaatttatttttgcatttagccagtacctcttttcccaacttatagccattagcaacgctaaacgggccattaacaaacatcaattcatcacttttgcctctcaccttgatatactccgcaaaagcggtggcacgtacatctacttcttgaatatgatcatgcttaggcccaatgccacctataaaaccaatgcgctgatatcctttatcaagaaaaagatcaattgcattttttactgtcagcgttaaatttgggcgaatggaatcaaataattccggggctggattagtatcgacaaagaccccattaggcaaaacctcatggagtttttttagtgttgcattttcaattggcgccgcgccaactccgataaagccctgaaaaagtgatgcatgtttaatcaaatcatctgcatcataaaaagtcttcatctgcagcgactctgcttctactgttgaaatcagcgcttgctttaatgaagtaaaatattcatcttgcagttgctcttcatgatttactcggtatagtaacgcaattgttggacggatcttcttttcctgatgatccttccaatagcccaatttattggcaatttctaaaatcttgttcttagtatcagccgtaattgacaaattaggatcattatttaataagcgcgaaaccgtagctgaagaataccctgattcttgtgctatttctttaattgttgtcatatttatatcttttctatcttaaataaataatttttaactttattatacaaaatatttacgtaattccaataaatatcataagcactttgtcattcgttttcgagtcaaaaatattaatcttcaaaatatttttcagtaaataatttacttattaagtaaatttattatctatgtgttataatataagcgttttcaaggttaatttttttatagaaatcaggtattttcatgaaagcaaatcttagctggcttgatgaccccgaagttttccgcgttaatcaagttcctgcccacagcgatcatccctatttcaagaactatcgcgaatggcaaaagcaaactagtagttttgttcaaagtttaaatggtgactggtgttttaagttttcagctaatccacaaacacgacccgttgatttctttaaaacagatttcgattcttcatcatttgatcacattccagtcccaagtgaaattgagctaaataattacgctcaaaatcaatatattaatacgctctttccgtgggaaggaaaaatttatcgtcgacctgcttacacaatcaaccaaaaagctaccgactcttttagcaaaggtgcagataacacagttggctcttacattaagcattttgacttaaattccactttgcgaggtcgtgatgttcacattgtttttgaaggagttgagcgagcaatgtatgtttggctcaatggtcattttgttggttacgccgaagatagtttcactccttcagaatttgatctaacaccttacattaaaaacaaaaacaatattttagcagttgaagttttcaaacatagcactgcctctttcttggaagaccaggatatgttccgtttttctggcatttttcgttcagttgaattgctcggcctacctgagacgcatttaaccgatctcgatttaaaaccagaagttacaaataattaccaagatggaatctttaatgctcaattgcactttacaggcaaaaatactggctcagttcacttgttcgtagaagatattaatggcaaaactctacttgagaaaaaagcaccaatcagcttaaccataaaaattgaaaaagaattattcaaaaatgtgcatctttgggataaccatgacccatatttgtaccaactaattattgaagttcacgctgaaaatggtgatttacttgaactaattccttaccaattcggctttagaaaaatcgaaattaattctgacaaggttgttttattaaatggtcaacgtctaattattaatggggtcaatcggcatgaatggaatatgaagcgtggccgcagcatcactttaactgatatgaaacaagatatacatgcttttaaagaaaataacatcaatgcggttagaacttgccattatcctaatcagattccgtggtactatctctgcgatcaaaatggaatctatgtcatggctgaaaataatctcgaatcacatggtacttggcaaaagatgggacaagttgaaccttcagataatgttcccggttctattcctgaatggcgtgaagctgtaattgaccgtgcccgcaacaattatgaaactttaaaaaaccatactgccattctcttctggtctcttggcaatgaatcatatgccggagaaaacattgcggctatgaataaattttataaagcacacgatcatagtcgcctgacccactatgaaggcgtggttcatacgccagaattaaaggacaagatttctgatcttgaaagctggatgtatttaccaccaaaagatgttgaagaatatcttaaaaataagcctcaaaagccatttttagaatgcgaatatatgcatgatatgggtaattctgatggtggcatgggttcctacattaaattgcttgaccaatacccacaatatttaggcggctttatttgggacttcatcgaccaagcgctattagtacacgatccggtgagtggccaagaagtattacggtatggcggcgactttgacgaccgacactctgattatgaattttcaggcgatggcttaatgttcgccgatcgtacaccaaaaccagcaatgcaggaggttaaatactactatggcttacacaaataatttacatataatctatggggatgctactttaggcattaataccccagataagcaatatattttcagctatgaaaaaggtggcttagagtctttaaaaattaagggtaaagaatggttttatcgcgttcctaccccaaccttttggcgtgcaactactgataacgatcgcggcaacggtttcaacttaaaagcagctcaatggctcggcgccgatatgtttagccactgtactgaaattcagctcaaagttgatcaacatgattttgcagatttgccaatcgctccactcaacaaccaattttctaatcatgagtacgcaagtaaagtcgaaattacttttatttatgaaactttaactattccaaaaacaaaagttgaaattacttaccaaattaacaataatggtcatgttataattaagatgcgttattttggtaaaaaagatttaccaccgcttccagtaattggaatgcgctttatcataccaactctagctagtggctttgaatatgaaggcttatctggtgagacttatcctgatcggatggctggagccagtgctggctcttttaaaattaagggattgccagtaaccaaatacctagtgccacaggaaaatgggatgcacatgcaaacgcatcaactcaaaatcactagaaatactacgctcaacaatgctgatcattctaatgaggattttgacctcaccgttgagcaaactgataagccattcaacttcagttgccttccctacacagcagaagaactagaaaatgcaacgcatattgaagaattgcctcttgcccggagaacagttttagtaatcgcaggtgccgttcgcggtgtaggtggcatcgatagctggggtacagatgttgaagatcaatatcaaatcgacccaagtcaagatcatgaattttcatttagactaaattagtgtttttaaataatttatctaaaataagtaaattatttactaaaatatgtgttataatgtaatcgatttcaataaaagataataactaaaataaaggagcgcaaaacatgaaagttttagttgtcggtggtgcgggttatatcggctcacacgctgtacgcgaattagttaaagaaggcaatgatgttgttgtcttagatgctttatatactggtcacagaaaggctgtagatcctaaggctaagttttaccaaggcgatattgaagatacttttttggtaagcaaaattttacgtgatgaaaagattgatgctgtaatgcactttgcagcatattcattagttccagagtcagttaaaaagccacttaagtactatgacaataacgttactggcatgatttcattattacaagctatgaatgacgctggtgttaaatacttagtcttctcttcaagtgctgcaacttatggtattcctaagaaattgccaatcaccgaagacaccccacttgatccaatcaacccatatggtgaaaccaagatgatgatggaaaagatcatggcttgggctgataaagctgatggtattaagtacactgctcttcgctacttcaacgttgctggtgctgcaagtgatggcacaatcggtgaagatcacgcaccagaaacacacttgattccaaatattttgaagagtgcaatttctggggatggtaagtttactatctttggtgatgactatgacactaaggacggtaccaacgttcgtgactacgttcaagttgaagatttaattgatgctcatattttggcactgaaacatatgatggagactaataagtcagatgtctttaacttgggtactgctcaaggttactccaaccttgaaattttgaacgctgctaaaaaagtaacagggattgatattccttacacaatgggtccacgtcgtggcggtgaccctgactctttggttgctgattcaaccaaagcaagaactattttgggctggaagccaaagcatgaaagtgttgatgacgttatcgcaactgcttggaactggcacaagagtcacccaaagggctacgaagacaagtaaagtataataaagatttctataaaaactaatcgtttttcaaactattttctacatctattatctaaaaaaatgacgctggttcgatcaactagcgtcatttttgattgaaattatttttcaaactctaatttagttagccaagtttgaactgcctgaataacttgagtaaaagtgattcccttagcaaaaggatgttttctcacgtatctattccaaagattctgcatattactattttcagcaataatatctacttgtcttagacaatacttataatctatatcttgtcctgtccaaaagattgattcacggtaattcgtagtattagcaaaagctgactttaaagtagctaaattgattcgttctctctgcagtatgaataaatcatagagatctttcatacgtgtattagctattcctctcgtaattaccgtttctaatttttccgctactatagtttccatagtatatgcccaaatattaatatgtcgatcttctaaatgtaatttatagctatattcaatctccctaggtgtaataacatcccctgttgaaacatctacttttaatggatatcttatcttccgaaaagaagcattaaaatgtaatcgatagcccttgtactcttcatgctcatgaatctgttcaatttctgacaacgaaatgcttaatagatcccccgctaattttatttgacagatttcttcaaatactttagctatttgtttttcggtcaaatctaatccttttatctcagcatcaatgtcttccgtggatcttttatcgataccaacaatagccgacaacaaaaaaccaccttttaaaatgaaattatctcgatattttgatactgaaattctttctagcaaatcatctaacataatttcttgccataatcgaccaatctcatttccttttatattatgctctctagcataccttcttacatctgctttgaactgcttctcatcaacataatttttcacaacaacacctctaagtagctatttacctttctagttaccctaaacttttctgcaaaagacattaatgtatttatgtcttttttcttttccttattccacatcttgaaggcattggtaattatttcgatatctacagcattaatcggtcgcaatatttcagctagagttctttcaggagtatagagattaatcacatttccattgaatgattcagtttgagttattccctgagtagccaaacttttagtttgaatatgtggatttatttcaatatccaaagttggattattgtagcccctaggaaaagtcatatctaagctaaaaggatattgatcacttaacccccataaatataatgctgtttctaaagaatagattccttttttatatttttgttgcaaactataaaatatatcctcggtatcatcaccaaataaataaattcccggacgtattttttctaacgtaccatcctgaacagctttcgaaatactataacttgatactccatttaatgctaattcacgatgagtaattgtaccgttatgtatttttgctagttgactaatcaatgatttttgtttcataagtactgtcaatatacgaatatggaattatattacctacaattgaaaaatatatttctcctttcattatttcgaacataagtttaatgaattacaaatataaaaacaagcgaacaaattattaagattttattatttccatattcttctttttcaattgcttttttacttattttactacactttactatgtagtgtagtaaaataagtaaatttagtgtccataaagtaagtaacattgattcaatatgacttactttatggacactaaactattatcctcaagtttggtatacaccagtttcttgctaaaagttgtataatgtaaacagtaaacaaacaaggagcatctttatggcaagtattagagacattgcacgtattgctggggtatcgccagctagcgtatcacgaattttaaacaatgatccaacttttagaatcaatgaggctagtcgtgcccgcgttatcgaaaccgccaaacgcctgcattattcgaaatctcaaaaacatcctggtcccaagcaaactgataaccagctctcgattgcactaatcatgcgttataacaaatctcgtgaaatcaccgatccctattttctcaatctgcataaaggcattaatgaagaagccaagaaatggcatttacgtattgagcaaccttttagaatagaagatgataataaaaattgggctgacttagctaaatttggcgcagtgctaatcgagggtgaaatgacacctgtagcaattaagcagattcaaagcattaatccccatataatttttatcgacgtcaacaccaatattcataattgtaatatcgttcgtaatgattttgtggaagaaacttctcatattcttgataccctctataacctgggacacaagaacattgtttacatcggtggaaaatcattggttcttgatcttgacggtaagattgcttgtgaaaaaaatgatctacgtgaactcacttacttgtcctggatgaaactccacaatcttgaccagtactgccattcttttattactgattggtcaactaactctgcttttgaagctggaaaagagatcttaaaactgcaacaacgtcctactgctgttgttgtcggtagtgatcctatggcattaggtgtttataaagcctttagtgatgcaggtgttaacatccctgacgatatctctgttgttagttttgatgatgtagatatcaatcgcttcttaactcctaccctatccagtgtctatatgaatactgaagaaatgggcaagactgccgttcgtttggctaaagatctaattacggaagatattcaaattccacttacgatcacttgccatagtcaattaaatatccgtgactctatttctaagaaaaaataatataaaagaaaagcctcgaaagcactgtactgagacgtaaaaagtagacaattaaaatattggattaatagaggcttgacttcgatactctttcggggttaagccttttaatctgctctttatcctttcgttgttatagtattcgatatattcctcgattgcttgagttaattcttgaagattatgatacttgtattcttgatcatagaacatttcagttttgagcaggccaaagaagttctccattagcccatcatccatggagttgctctttctggacatgctttgagtaataccatggagttttaaagctcgctgataacgagggctttgatactgacagccctgatcagtatcaaaaatgcagttattaagagctgtttctttggcaaaagccttgtcaagcattgtcattactaaatccatatctggatgtttggagatagtataagaaactatatcgccaccgcagccgtctagaataggcgataaataaagcttttcattattaagatgaaattcagtgatatcagtataccattttgtgttaggcagggctgcgaagaaatcacgatgaattaaatttggagctattttgccaatagtacctttatagcttgaatatttgcgcttattgcacctgatgcctttaagacctaatttatgcatccaatagcgaacggttttctccgtaactttccagccctctctgattaactgcaaagctactctgcgatatccatagcggccttgatgatgattaaaaatctcatggattctagcaataagctttgaccgtttaggcttgacgggctgtcgtttgataatcttgtagtatgagcttctggcaattataggtagctcagggtgctctgcaatcgcagctaatacataatttaaactaactttgaattcttgccttagatccgtaatcaccctagctatttcttctgatcttcttgatccaaggcacttagtttttttacgtattcgttcacaatacgcaatcgcaagttttcttctttcagctgctggatctctttctccagttccttgcgagatttctgcttttctttggtcacgggcagggcgtcctttctgtttgataatgacattatacccgtttttcttatattctctaatccaattgttaagcatgccaatacttttaaaccccagttccaaaggcagctgtaagtatggtttattgccaaagattgcttgttcaatagttcgctgcttaaactctttggagagactgtaaaatagtttgtgtaaggatgaatgattccttaaatttatttctttaaacattagaaaaaggagttcctttctcgtatgattggtttgaacaaaaaaacacatacagaaagaagaactccttcatgaatgattttaccaaagattttgctcaagctctattcaatccagacaaaataaatgatttattgcgcaaagagctacaacaggctgttaataacttgctagaagctgagttgactgcctttctaggctatgatccctatgccagaaatggctggaatactggcaattctagaaatggtgcttatttccgcaaggttgatacccagtttggaccaattgaagtgcaagtgcctcgagaccgcaacggtcagtttcatcagcacacgctgcctgactacaagcagcactctgatgttttggaaagcacgattatcaagctctactccaaaggcgtaactaccagagaaatcgctgacttgattgagaaaatgtatggcagtcattatagtccagctcaagtatcaaatatttccaagcagatgctccccaaggttgaggcttatcacaagcgcaagctaagcgacaagtttttctgtgtctatttggatgcgacataccttcctttgcgccgagaaacgtttgagcgtgaagcagtatatattgccattggcattaaacctaatggacataaggaagtcattgactactgcattgctcctagtgagaacattgaagtctggacagagatgcttcaaaacatgaagtccagaggcttgaagcaagttgaactctttctttctgatggtgttgttggcatgaaaacagccttggccaggacttatcctaaagctcattttcaacgctgcctggttcatgtcatgcgcaatatctgtgctaaagtccgggtggatgaccgcgaaaagatcatgaacgaattcaagcagatacatcaacagacaagccaaaaagaagctgcagctgtcttgcacaaattctatgccagatggaataaagcttatagcaatgtcatcaaaggtttgaaggaaattgagcccgatctgctggtcttctacaattatcccaaacaaatcagagcttcaatttattcaaccaatatgattgaatcctttaacaacgtcatcaagcgtaaagctaagcctaaggcagaatttccaactgaacagtcgcttgatgcatttattggcatccaggcaatgagctacaatgaccgctatttcaaccgaattcataaaggctttggtcaggttcaggataccttagaatcttattttgaataaataattcaaaaatcaatttacgagaaagaactatttacacaaaagatttgacaggttcaataaatctagttcatgagcttgttttgttatactttaaatttaactttgagccattttaattatttaattaacttttctatccagctaaattccaaggaattcctttaatatccttgactattcgtagaaaaccaaaataagcactgatgttaaattcatcagtacttacaattgtagagtccctttgttcaacccgtattgataacgactgcttacaataataaaattaagaccactagaataacagcttatggttttcgcaactttgatcattcccgtatccgaagtctactagctctcaaatctcatggtaaaaactaagctaaaagaaaaggtcagctcaagcagcttcgctacttaaactaacctcatcaaaatacctcatcagtactgacaaagggataaaattgtagagctaatttgattacttacgcttcttgtttacagcagcaaggccaaacattcccaataaggtggaggcacctaagcccattaatgttaagctattgtcattaccagtttgtggtagttggttatccttagctgtcgttggttgagacgtaatcgtccgcttaacagtcttgttcagatctttcttatcaacaccctttggatagttcttgccaggattgtctggaagcttatcgcttggtgtcttcggatcggttggtgttaccgtgatgatcttatgttcaaccttaaccgtaactgtttgaatgccgtctggagtagcggtgatctttgttggaatctttggatcaggaacaatctgccaacctgcaggaacgtttggtgtaactggaatctcttcatccgtctttcctgttaatggggtagtaccaacttctttgccgtttggatcaacgtatgtgatcttcccagtctgttcggttggcgtgtaggtaatttcaatttttggatctgtgtaatcaaccgttacctgatcaactgcagggacttctgcttgacttggagtgtaacctggaatttctggtgcattatacttatcaagctttgaggttgtccatttgccatacgtaacttggcctgtaacctcgtcaacagtagccgtccgagttagagtagtctcttgactagcatcaacagttgagccagctggtttattaacagtaatcgtccgcttaacagtcttgttcagatctttcttatcaacaccctttggatagttcttgccaggattgtctggaagcttatcgcttggtgtcttcggatcggttggtgttaccgtgatgatcttatgttcaaccttaaccgtaactgtttgaatgccgtctggagtagcggtgatctttgttggaatctttggatcaggaacaatctgccaacctgcaggaacgtttggtgtaactggaatctcttcatccgtctttcctgttaatggggtagtaccaacttctttgccgtttggatcaacgtatgtgatcttcccagtctgttcggttggcgtgtaggtaatttcaatttttggatctgtgtaatcaaccgttacctgatcaactgcagggacttctgcttgacttggagtgtaacctggaatttctggtgcattatacttatcaagctttgaggttgtccatttgccatacgtaacttggcctgtaacctcgtcaacagtagccgtccgagttagagtagtctcttgactagcatcaacagttgagccagctggtttattaacagtaatcgtccgcttaacagtcttgttcagatctttcttatcaacaccctttggatagttcttgccaggattgtctggaagcttatcgcttggtgtcttcggatcggttggtgttaccgtgatgatcttatgttcaaccttaaccgtaactgtttgaatgccgtctggagtagcggtgatctttgttggaatctttggatcaggaacaatctgccaacctgcaggaacgtttggtgtaactggaatctcttcatccgtctttcctgttaatggggtagtaccaacttctttgccgtttggatcaacgtatgtgatcttcccagtctgttcggttggcgtgtaggtaatttcaatttttggatctgtgtaatcaaccgttacctgatcaactgcagggacttctgcttgacttggagtgtaacctggaatttctggtgcattatacttatcaagctttgaggttgtccatttgccatacgtaacttggcctgtaacctcgtcaacagtagccgtccgagttagagtagtctcttgactagcatcaacagttgagccagctggtttattaacagtaatcgtccgcttaacagtcttgttcagatctttcttatcaacaccctttggatagttcttgccaggattgtctggaagcttatcgcttggtgtcttcggatcggttggtgttaccgtgatgatcttatgttcaaccttaaccgtaactgtttgaatgccgtctggagtagcggtgatctttgttggaatctttggatcaggaacaatctgccaacctgcaggaacgtttggtgtaactggaatctcttcatccgtctttcctgttaatggggtagtaccaacttctttgccgtttggatcaacgtatgtgatcttcccagtctgttcggttggcgtgtaggtaatttcaatttttggatctgtgtaatcaaccgttacctgatcaactgcagggacttctgcttgacttggagtgtaacctggaatttctggtgcattatacttatcaagctttgaggttgtccatttgccatacgtaacttggcctgtaacctcgtcaacagtagccgtccgagttagagtagtctcttgactagcatcaacagttgagccagctggtttattaacagtaatcgtccgcttaacagtcttgttcagatctttcttatcaacaccctttggatagttcttgccaggattgtctggaagcttatcgcttggtgtcttcggatcggttggtgttaccgtgatgatcttatgttcaaccttaaccgtaatcggggtatagtcgataacaactgtttgtggtgattcagtgtagatgtaaaacttttctttacctaatcctgctccaggagtagtcttttttgcattaatatgataagaatagcctggaatatcaatatcattaatggaaaaagctggtaattctatgctaatatcattcttattaactgatataaatttctcatagttctctttatcctgttgagtaagaaatgtattcttatctacttgaaaaaaagtttttggtaaaacgtttttctccaaaattgatatttttggcaatggattattggatgtatttacttcagcaataacttgaggtttataattataaatactcgatctagtagatgtgtgcgatcgatgctgatgctttctcccttttaagcagctaacattcaaagtcatagttacagtttcaacaccggtaggtttgtttaatattactgttctaattacatcgttattatctgaatttctaaattcaaaactctttactttttttgtatataaagagtaatcaaatctcgacaaatcagcagtcttggaattttccacatttagtgtagaagaatttttagtagaatttgttacttcagttttatccaacatctgattatttactttgcaattttcagtttgcatttgtttagactgaaaagcaccggttggaattttaactttatcatttattatattggtgccattacccgatccggctaattgttgattgttattatccctcaaattcgtatcagccataacataggagttgtccactcccaagtataaggtaatacctatggtaacagaaataagaccaatagataacttacgaagtgaaaaatgatcttgttttggttttaactttaccagacggccgtaataattctttgctgataacatagtatctccctttttatatttactctcagttggaaacattgtataaaaaatcaaccataaacagtattcttaaaagattagaaatcaatccccattacttatatttatataaagtttattccatcctattataatgatatatcattcaaaattccgaagctaattaaagcatcgcgtcttgattagcttcggaatggttggtaggtaatcatattagccttgatgtttattaatgccaagaacagctaagcaactggttaacaggcttacaataatcccggcaacggttgttaagctattgtcattaccagtttgtggtagttggttatccttagctgtcgttggttgaaacgtaatcgtcttcccagtttgcatgttaggaacattaccttctagtttgccagtaacagcatttccattaggagtagtgtttgtaggcgtattagtagctggtgttccttgtccttgatgatcattagttgttggttgaccgccattagttgggatcaaccaacaactaatgatttgattagggttaccatccttgaaggtgtaaaatgttggaacactttcaccaggaactaattgataaccatcaggaatgtgaatattaactggaactgtctgaccagacttgccaggattgtccggaagcttatcgcttggtgtctttggatcagttgttgttgttgttgtctctggcgttttgggatcagttggatctgtgtccttagtgtaaacaaaagttgtgatgtactggtatacagtatactggccactcgtcgctccaagagtacgaacaagacgataacctttaattttcttaggttggacttgccatggaccctttgcataccagcctttttgcggattaaccccattatttttttggttaggattatctaggttgaacgcaagcgtatcattattcctaagcacatttccttgctcatcaatgtacctcacagttactggtttgtttggtagcaagtaaacatgtatccccttagcgtaccaattgaaataatcagaattaagatatgtccctgtacttcctatataggagtaaccttgtttttcgtaatggctaatctcctcactcatttttttctcataattaccattgtttaggtcaatcctttcgccatagctaccagcaatcgtaaagagtttgtacggtagatttgtttcttctggaacaagtaacaattcagtcctattactatcagaattattttttataaccttcttatacttgaaagttaaataaacatagttaggatcagctaacgaatttcgagtttgaccagtgattttaccctttaaaacaggttcagaaactaatttatatccaggaatattaatggctgcggcttcatagcgtgatgcatccggtgctttcttatcaccagcacggtgttgtggagattcaggggccatccagaaactatctagaacgattgatgctaaaatatgcccgttatctacatcaacatactctactttgattggtgacaatgatgcgtaatctaaattaatgttaatgtcttgcgtagtaatacctttcttaaggcaggcattaccttgtttatcaaaatagaaatacttattcaaaacttctgaattcattaatttataaccggccacagtaaattcttgatccacactatcccctggtcgaattgtggtctgcttgaaaggttgtttgaatacataatgaccattactaatcacttgaattggcttatgtagggtgacatcgcgaaaattcatagtaatgttgtacttactgggcagtggttgttttgctgtgtttgttgtacttactgggcagtggttgttttgctgtgttttatggattatcggcatttgttgcgctggcgttgttgttttatttggaactaatgttgatgaagtttgatgaacaaccgtatttgattcgtcgctaatccgaatattgcttgaatgggcactaacttgtggatcagtcacttgagtcgtgaatgtattttgagcagcaactgtcgtatctgccttggcattaccactaataatgaaggttaagccaacaaggacagatgccgttccaactgttaatttcttaatggcaaatcgttgtcgttttgctacttgttgcttatgtaatttgtccatattttatatcctctttctaagacgcaatttattacgcgtggtgctagttaaatcgttctaggcaatatgctatattataagccaaaatggctatttctagccgctgctgaaaaccagctaagctccttgcccagttattttcagcgttatagtagctaagcaaagaaaagtcgctctcaattgttcttctaattgccatcagttgatgatcgttatgctttttagcgcctttcatgtttcttcgatatggtgtccaaagcacatagccgtcatcacttactatcgcgtgaaccttgaagccgtaataatagattttcttagtggctttatatccgatatcagatatgccacgaaagatcttgacgcgatagttgcggatgggctgacaaactggaactgggaagctgtcaataattaagaattctccagctgtttttacttcttgattccaatcttgacggatacagcgcattaaaggcaaaagcattcgtgcccgacgattaaagcgagaatgagacaaaccgacaaagaatttacaaaatcttctttgagattcgataccaatttcagtttgccaaataagcattgctaaaatagaactgtctaagagcttaacctgatcaatatttttacggtatttcagctcatcaggagcacaaagcttgtacaaagaacgacaaattacatttagccgagcaaagctaacttgtaaatggtgagaaaaacgattaagcttgagatagttcaattagatcagactcttttctatttaatttaagttacaacttgagtctaatccgattggacttttttattaactaaaacgacttaactagcaccacgcgtaatttattatatattgaatatgtggggggggcaagtgcttttgtgtggaaaccctgctgagttgggtcccaactttcaattttcactggtttaaacagatgtgagaacacaatgttaccaaataaatccgttatggttaggtgaatgatttcatcgctttgccagtctagaccggtagtatcaatccagtaaataaatggggtataacattttaccatttttcaaatcctccagcgcaaaataatatatacttttttaaaactaagctatattattttgctccacctgctttcggatccgttgcaaagttgaaatcgaaatatcaaaagcactcgcagtctgtttgtaggaatgagtaagcaagtactcataagcggcttggtagtgcggggtaatggctctttggggtcgtccttcatgataatcagaccggtgtaacttagcataacgtttcccttattgggtgcggtccacaatcatatcccgttccatttccgccactgctaagagaattgttttaactaatttacccacagttgagttttccaacatgccaatgttaagtacattgatcttcactccttgattcattagtgggtcaataacatttaatgcttcccgggtatttctagctaaccgatccagcttggtaaccgtaatcacatcacccggtttcgccaattgagttagtttagcaaattgtggtcggtcagttgtagttccagtaaatttttcggagaaaatgcaatcctcactgatcccagcagtttgcaattgattaatttgatctgctagttcttgtccctttgtagacaccctagcatagccatattccgtcatttcaatccatcctttttgaccataagtttctgaacatcatttaagcttgatgttgtaggcccagcacgttcattcaaaaagctaaaagtttttgaacaggcttgcatttaatatagtgcgaatggttgagaatctacatagccaagttaaaatttggtgtcggtttagctgacacattttagtcgatgtgcgacaccgttgttgacaccgaatcttgaaatttgaaaagtgtcagttattaactcaaatggtgtcggtctggtgttggttaagttgacactagcagattattgttatatcaagcattgggtagcttttgaattgttttggtgtcaatggagatatgatggataaagctagtagtatcaaggtgttgagaggaaaagtgtcaaaggtgtcaggttttgaccagaactttttaaattaactaattaagaagaaaaataatagtaattaatgtaaaaatgtactgagacgtaaaaagtagacaattaaaatattggattaatagaggcttgacttcgatactctttcggggttaagccttttaatctgctctttatcctttcgttgttatagtattcgatatattcctcgattgcttgagttaattcttgaagattatgatacttgtattcttgatcatagaacatttcagttttgagcaggccaaagaagttctccattagcccatcatccatggagttgccctttctggacatgctttgagtaataccatggagttttaaagctcgctgataacgagggctttgatactgacagccctgatcagtatcaaaaatgcagttattaagagctgtttctttggcaaaagccttgtcaagcattgtcattactaaatctatatctggatgtttggagatagtataagaaactatatcgccaccgcagccgtctagaataggcgataaataaagcttttcattattaagatgaaattcagtgatatcagtataccattttgtgttaggcagggctgcgaagaaatcacgatgaattaaatttggagctattttgccaatagtacctttatagcttgaatatttgcgcttattgcgcctgatgcctttaagacctaatttatgcatccaatagcgaacggttttctccgtaactttccagccctctctgattaactgcaaagctactctgcgatatccatagcggccttgatgatgattaaaaatctcatggattctagcaataagctttgaccgtttaggcttgacgggctgtcgtttgataatcttgtagtatgagcttctggcaattataggtagctcagggtgctctgcaatcgcagctaatacataatttaaactaactttgaattcttgccttagatccgtaatcaccctagctatttcttctgatcttcttgatccaaggcacttagtttttttacgtattcgttcacaatacgcaatcgcaagttttcttctttcagctgctggatctctttctccagttccttgcgagatttctgcttttctttggtcacgggcagggcgtcctttctgtttgataatgacattatacccgtttttcttatattctctaatccaattgttaagcatgccaatacttttaaaccccagttccaaaggcagctgtaagtatggtttattgccaaagattgcttgttcaatagttcgctgcttaaactctttggaatagctttggtttttagtagttaaaatttctattccatgcatatcaattaatctaagcatatagtctaaattagctagattcattctgtacgctttagccaattgactgattgagatattttcatctttccatttatgataaatttctattttttgttctttattaaatttagacatagtaaacattctaagctaaatagtgaattagttatccgacgggataattgattcactatttttattcttttgtagaattaaagtagtagtaaaacgatatgccctgaggtctttagacacttgatgtcgcataataaactggcagttttacttaagttttcaatagtctcttcgaagaatgtggacactagatgtcgagtttagaaaattagatctgatttcttaagtaaatacgttttactactaagttttggaggtttttattatgcaagttacttttggaattgatgtaagcaagtctacttctactgtttgtgaactaattggtgaaagcaaaaatgaactaaccattactaataatcgtcctggttttattcaattgcttcatgaattaaccgctttttctaaacatccgcaaattatttttgaagctaccggtgtttattcacgtacactgcaatcttttctggaagactatggctatgattatgtaattcttaatcctcttaaagctaaaaaagaaatggatatgggactacgtcataataagactgataaaactgatgcttatcatttagccttaattcaaagactatatcatcatccaattaatcaacttcaatctcaaacttataagcagcttaatgctttgagccgcttctatgaccagttaacagctgacttagtaatggctaaaaatcgactttaccaagctctacaatcgacttttcctgaaattgaaaatctattttcttctgctaaaggtaaaaattactggcaaatagttgtgcgatatcctcattgtgacttagtaagaagagaagataaaaaacagcttattaactggttaatgagcttaaaggggattgcttttaaacacgctctaaggactgcagataaattaattgaattagcttatcaagcttatccagttgtatcttgctctagcatagaagtcgagcaagtgcagtattatgcacacagattgcttaatttaagtgatcaaagagaaaatttaatcgcaagaatggttaagttagcgaagtctttgcctaatcatgatttagaaaacctagaaagcattccaggctttgcacagaccactgctgtcagagttttagcagagttaggagatttacgcagatttagtaatcctaataaaatcaatgcttttatcggaattgatccaggcagatatcagtcaggagaaatggactctaatttaagtattactaaacatggcaatgcagtcgcacgtaagttgctttatcgagctattggacaaattgataatgcagctaagacaaatccgtgtcatatagcagattattatgaaagcaaaaagctatcctctcaaaccaaagggttcaaaaagatagctattgcttcaattcataaactaatcagaaccatttatgccctgattatcaatgatcaaccatatgattacaacgtagccacacataatcaaaaagactttagtcgtaattaattgatcaagtacattataacgctaagcccaaaaatcagatatggatctgggcttatttgtcgtgtctaactaaaaaaataaatcgacactaaaagatgtttaagttgaaatttaaacaaaaaatgaagtcaaacttcttattatgcttgactttacgtaaaaaaagtgtctgggaaaaaactagcttccagatgaataaaaacgatcaagatttccttttttaagaatcttgatcgtttttttgttctctttaaaatttttaacaataaaaatcggcccttcagccaccttctttgacaatatttgttcaaattcatcatcataaaggcaattccgatatcggtttcgaccttctctttacctcgcaggtgcgttctgcgcatgccaaatacgttcttcaaatgtccgaaaactggctctacatcatattttctcatgccatagatgtgtctgccttcttcgctttggagaacttcttttgctttttcttttaaatattgccagttaggattatagcgaacttggcgctggcggccgctagctgttttagccaattgttccaattctggcgttagctggaactcgtctgcctcataaaccttaaaatcacggacctgaccagtagaacgatccttgcgctggctgtaatatttgaaattgaatctgacgccatgatgatcaatgtaataatcatctttttcattgtagtaccagttgattagcttagttggatcattcttatactttttggtctgttctttttcatacatagtgtagggaataaagtacttcttgtctggatatttttcctccagcatcgaataattgtattcactgccatagccagcatcggcgacgattttgtcaaacttgtccaacacggtcatttgatccaaaaccggctccaaagttttgaaatctgtcggattaggaaagatggcataatcaactacatattgatcggtcgtgactgcttgaatattgtagccaggctttaattgaccatttttcatgtggtcttccttcatatgcataaaggtggcgtcatgatctgttttggaataactgttgcgtccggcaaagatctcttcggcttcttcatatttttgcattcttggcacataatcttttcttagccggtgcagaatcttttttagtccacgtcgcttggcttttcgaggtgaaccgccaggaatggctttgttttcctgctcaatctctttagtcagcttgttaatttctgcttcagtttcttgagctaattcctttagcccctgactagtttgaactttttctttttccatttctttgactacttctttagtaatcaattcatcataaagttcaactgcctggcctttcagcttttcatgatacttttcaaccgctttgcgccagacaaatgtatagcggttagcatcagcttcaatcttagtaccatcgataaaagcagcaccttcattgattaagccttcatcttctaacaggttagtgaagtagataaagctctttttaatcagttcattggcatggctgcttgatctaaaattattgatagtatgatatgaaatcttttgctggtcagccaagatcatcattggcagattttcttccagcatcaactcaatctttctgccagaaaaaactcttctggagtaagcaaaaagcagtattttgagcatcatggctggatgataggctgggcggcccgttttagcagtcttgcctactaaaacatcttctggaattgaatctacaaaccagctgatgacattagccaaatgattggccggaatggcaaaatctagattaagtgttaaagcagtttgacctgtgatataattcttgtacatgttagtttccaccttttttattttgtgatgatttaataatatcaaggctggagctaaaagtatacaaaaagagcgttgaaacaaaaattcaacgttcttttttcatgatctgagacttagttttttcccagacactcagttcactatttactcgacactcgcttttacaatatctcccttgcccctattcaattccatcaaaacgataaagtcagctttttggagttgactccaaaaagcagcaataaatgtcatttgtttggagttcattccaaacttttactaacccttgatactatcaatcccacagccaactacgacgggattcaaaaaatcaatcttattgattggctactacaataattacaacgtaaaaaaccacattactcacttcaatttttgagcaatgtggttttatttttctgtaattttaatgctttctacaacctaccattctcttcatccatggttcgttccatcaaatcatgaactgcatccatgtcattcagtaatacttcctccttagctgttaaggttctctcttccttggcttcagtcaacatacgatgatgccaacccagaatatcactcaatctagtgtacattataaagcccaagaccttactatcttccaacagctgacgtagttctttttctggctccttatagcgctcatcttcatcccaagcagcaaaatcatcaataaccttttccactaacttatgaagttcttcctcgcttttcattaactgtattctttactatttgttgtttacagtcaaccacattttgaaaaaatctcacataatagaaatttaatcatattattcaaaatattcttaagcaaattaaaaagagcccagacaggtgactaaaccgtttgaactcttggattaggaaacttttttagtttcaaactacaacgtcagattaattattgaatttcttgtagttttggatgtagcgcttagtgcggcagccaagcaagtcgccagcgtgttcccattcagtatacttagaagcatcgcccatttggctacttgagccagcaaagccaccgaagagcatctgcttaacgttgaagtagatttggctcttcaaagccgacattgtacggtagttggtgttaaattctgaagaaattggcaaacctgcttcatcttcgtaaacttgaccaacacgtgagttaagacctgaagccttggctgcacgttcaataccagtaacatagtgatcaggatcccagcaagacttgttgtttgagtaatattgattagctacacggtcagcaaaatttaatgcaccgcgcttgtaagtccaagattgcttgccaagttgattacgagcagaattaatcaattccaaagtgtagttgcttaattcaactttttgactatcagttaacttagttacattaaccaaggtgttgtctgaaccagcatcactatcattattttctttcatacccttaattgaggcatttaccaaagccttgctggccttaccagtttggttccatttgataacggcatccttggtgtaaccagaaggtaatgttattgatgcagcatcaacatttgaagtttcttgattgttaactgcagtaattgcaccacctgctaaagcaacggcaatgctaattgttgataaaagtttaatgctctttttcattttcctaatcccctatttattatttatgaaagctcgaaatttttaagtccttattattttcaagctttaaatttaaactcatttatttaagaagtagtcggtttcttaaacttcgttataagtctcttcacttaatagggtagcaggttaaataaagaagtctatatgcgtaaatatttaataacaaacctagataacatcttaaaagatattgaaagctctttcaaatgcgatagcattaggttaagcaaattaaataaccatttctatataattaactgaaacttgaaagctaagattaacgctctttccccgcgcctcttggctttttcttatcaaaaataaaaacgcaggatctctctgcgttatactttaagtgtcgacctaaaaagtaaaggagatcctgcgcaatgaacagtatagaacaaatcgacacagaaaacgatactaaatccttaatttcttcatttattaatctaattggtctagctaagttaactaaacaagtcaattttaagcgtaaatccaccgtttcattaaccatgattatctcttggctgatgtcagtacattttgctcggctttctttattcagagctaaggatgacaaacgtttttccgttagaactgctcgcaatgtacttaacgatggaagaatcaactgcaaaaactattatgcttgattgcagcccggctcattggctgcttaaaaccatttatcgataaaagacgccgacttgcttttatcgttgacgatacgctgatggctcggtctttttctaaaaagaccgaattgctagctaaagtctatgaccatgacaagcatgagtatttgaacggatatcgtggtttaactttaggctggagcgatggcaataccttcttgccggttaactttgccttgatgtcaaccaaaaccaagaaaaatatgattggagctgctcccattactgctgatgaacgttcaatttctggtaaaaggagaaatcaagctcagagaaagatgaatgatgtaactgtagagttgattagacaagccttacgattaggagtagaagctaaatacgtcttattcgattcttggttttcttctccaagaatgttttggattttaaagaagatcggtttagatggacttggcatgatcaagaagagttcaaagatttattacatttatcgccattgccgctatagcgttaaagacttgtatgatcgtttggctgcttcaaacatccgtaaaaagaaacattatctttattcaagcatagttgaggctcaatatcatggacatagctttttattaaagctcgtctttgtctccaaccgtggaaacaagaacaagtatttggttttagctactactcagacaaagcttagctctgaagaaatcatccaactttatggtcgtagatggcaaattgaaacatattttaagacgtctaagcaatatcttgctttagataaatctcaagttcaaagctatgatggccaatgtggctatatcgcagttacagcaataacttatgatctattgacctggcaggaaagacaaaatacagatgataagacaatcggagatttattctatctaatgaacgaatccttacctgatattagattcgtagatgcattggtctacttaatttcagaattaaaagagcttaaacagaatagttttgaaaagatagatgaagtaatcaatgactttattaaccaactgccacgattcatacaaattgcactgaaacagatcatataaaaactaattacgtctaagaaagctcaatagtgacaggacttgagcttgattttggtgctttcaattttcagataattaataaacaatttcgaatttttttacttctgctctaaaatatataatatattatacgcatggtgctagttaaatcgttttagttaataaaaaagtccaatcttgttagactcgacttgtaaatagtaataatagaaaagagtctgatctgattgaactgtcttaagcttaagcgttttagccaccatttacaagttagttttaaagatttagtgataatttgtcggcactggtatcgtttgtatgcaccggctgagtttactcatcggcgaaatattgatcaaattaaaactacggacagtctgattttggctttacttatctggcaagctaagacaggaattgaatcacaaagaagattctgtgaatgtttcaattgtttatcacactcacgttttaatcggcgttcacgtcagctattgcaattgatttatcagatacggcaagaaatgaataaaaaggttgacctgaatggacatttcttgatcattgacagctttccggtacctgtttgccaaccaattcgcaactatcgtgctaaaatttttcgcggttatgccaacattggttataaggccaccaagaaaatttacttctatggtttcaaagttcatgccattgttagcgatgacggttacattcttgattatgtcgtaacaaaagcatcagttcatgatgccaaggagacagttgaactgctggaaaatgcccatccatctaattactatcttcttggcgacgaaggctatttaggcaaagaactgcatcaacagctaaaacaaatgggttatgaactttggacaccatatcgtaaaaatatgacaggagctaaaaagcacaatgatcatcaattgatggctattcgcagaacaattgaaagcgacttttcgcttctgacctattacaatgccgagaacaatcgagcacgtagtctgataggctttcaaagccggttggaaattgcaattttagcttataatttggcttattgtctagaaagatttaactagcaccacgcgtaatatattatataaatataaccatagttatcttcattaggctaaaaagctatattaaataatccttgttatatcagcatttaaggagattttatacaatttaaatatacacatatagacttcaaactgcctaatcatttataaaattacaaatcataaaaaactaccaagattctcaaaaaagaaaatcttgatcgttttcaatcatctggaagggaatttttcttaagaaagattatttagcaaatcccaccttataccaaatcgaatttgattcagccggtttaagtgaatagttaaccagcttgctattcacagccttaatggagtaagaattagtcattggcacaatataagcttcatcattcatatattgctgccacttatgaaaggccttaacccgatatgcatgattaaacgccttagacgaatcaatttcattgagtaatttgttgttctcttttgtcacaaatcttgagtcattcattgcactagtttcactatagattcctctaggtgatggttcactagacaatgaccaggaagcaataaacatgtctatatttttatcgtcttggtctaacttatcatagaaagaattgaattccattaatctgtttccagttaaactcacatgaagtccaatctttctccattgttggatgtagttttgaataattggttcttgaacggcggacccactcatagctgctaaatgaatgctcaatggttttccgttaggttgaactctccatttgcctttcttcttatatcccgccttatctaacaattcacttgctttctttaagttgtaaggatagcctttagaatttttatcaaagtaatcaccaaattgttcaggaattaaggttggcactctaaaagtcaaaccttgcgtgtatctcttttcaacttgattaatattcattgcataagcaattgcttgccgtaaagatttgctattcatcttagaattaggattcataacattcttaccatcttgccatttacccactttgaagccgagatagctgtaagcaagaggaattttagcaatgaattttgtatctttcgcatctttaactgcttgccattgtgaatttaccacatcggctatatcaaacttatgactcttaatagcttgggatgcggaattagtagaaactacctgagcaacaattttgcttaattttggtgtacctctccagtaatatttatttggaacctaagttacagattgtcctctaactaccttgctaactttataagggccaaaaaagataggattttttctaatttgatctgatgaaaccaatttactgaaaggaatattctttagataatgatacggagcagcagtttcaataaagtaatcattacctgattgcaacataccaggcttcattgaaagaaaatgaatgacaatggttctgccattttcaccattaggaaattgaataccagaaatagtttttgcttttccattgtgataagctttcataccaacaatattttctaaagaatctgaataccgtaaactattagttgctttgttggcagtcatttcatatggatattctaagtctttagctacaacttgcttaccatccgaccatttaacacctttttttaccgtaatagtaattgtctttgcatttttatcaagtttaaaagtagcaggtcctttattattaatttgatatacgcgtggtgctagttaaatcgttctaggcaatatgccatattataagctaaaatggctatttctagccgctgctgaaagccagctaagctccttgctcggttattttcagcgttatagtaactgagcaaagaaaagtcgctttcaattgttcttctaattgccatcagttgatgattattatgttttttagcacctttcatgttttttcgatatggtgtccaaaggacatagcccataccttttaactcggcagctaagtcttttcctaagtagccttcatcgcctaaaagataatggttaattggatgagcattaatcatcaattctactgtttctttggcatcatgcactgatgctttagtgactgcgtagtcaagcaaatagccatcatcgcttactagcgcgtgcaccttgaaaccataataatagactttcttggttgctttatagccaatatcggctatgtcacggaagatcttaacacgataattacgaacaggctgacaaactggaacaggaaaactgtcaataattaaaaattctccagcaacctttacctcttgattccaagcttgacggatgcagcgaattaaaggcaaaagcatcttggctcgacgattaaagcgagaatgagataagccaacaaaaaatttacagaatcttctttgggattcaattccaatttcagtttgccaaatgagcatcgctaagatggagctgtcggaaagctttgtttgatcaatgttttttcgatgcgtaagcttatcaggcgcataaagattatatagtgaacgacaaattacatttaaacgactaaaactaacttgtaaatggtgagagaaacgattaagcttgaggtagttcaattagatcagactcttttctatttaatttacttacaacttgagtctaatccgattggacttttttattaactaaaacgatttaactagcaccacgcgtatttgatatgaattatcagtatcgaataacccctcattaccaaattgcatgacatcagaatcaacttgatcaactgataattgactatcaaaaatacctttaaaaggcgtatctgtttcgattgcgtagtttaaagtgccacctttctgtgcagttttttgtacagtttgttcaggaaatttctttgcactttttgctgcatttgtattgctttgaccacatgctactaaagttaaagcagcaccaataagtagaccagttgaaccaaataatttaattgacttcatagttttttctcttttctgtaacaaaaaaaggtccacatcccaattaggaatgtgaaccttgcttagtaatcaacttaattaattatttttaaacaaaattcgccgcacaccataatttaggatcacaaaataaaccatcattttggtggcggcgtcgtaattctactgttgctgaattttgtgattctaacatgatatgtagctcctttcttaaataattttaatattatgctaatcttattttattgttttgtcaataatgaattttgaattttatcgataatctgattcatcagttttaaaatgtttgtgtgaagggatttcatgagaactacgctctttttataaaaaaattgataagagacaaaagagtaagcagatatagacttctgctcactctttattttattgtaaaaagaaaaagaaccgaatcaaaatgattcggttccaaaagcgtcaaatttgtcaatgtcttaacttaatgatactgtcactaacttaaatcaaacaaaagcaaccagtatagatcttttatctacactggttgctttattaattgatattgcagtatggccttactactgcattgtatttagaattatttgtctttagcttcagtgcttctttcgtactagtcattttaacttaggctaattccactcaatactaatcttgatcgcttttttcaacgtttgatagacagtagatactcttaaaatatctttaacaaatttatcttgatcttcatgagacataggactatcaaatgatattttgatagttatcgtatcaacatctggcattccgtgtgataatctctcggtattcgcttccgcattaatcttaaaattttgaacgtccagatggtgcgccttaataagcaatccagctgaaatagacatacaagaatttaatgccccagttaaatattcaacaggatcagggcctccagttttatcaccattgtcagctataaagcgatatctggcagttgaattttcaatttgccattcagtatcgcttaattcactatttaccacatattttgtcatttttccctccactctacaactattctgccttaagttttcaacctaattatactctatcgtggatctagttcgtatatgttgttttgcaccccgatgagatcacggacattaaaccaaaagcagtccatgatttctcatgaactgcttagaaagagatacttctaatattttcgaatttttattgatgttactctgtgacctacatctttataaagaatgatattagccctttccttggttggtacaatatagtcacgtagattaactaaattaactgtccgccaaaccttttttgcataatcaattgattcatctaaaggaatatggaaactgtcaaatcttttgtgtaaatagttctttctcgtaaattgattttttaattatttatttaatcaaagtaggattctaaggtgtcctgaacctgaccaaagcctttatgaattcgattgaaataacggtcattgtagctcattgcctggatgccaataaatgcatcaagcgactgttcagttggaaactctgccttaggcttagctttgcgcttgatcacattgttaaatgattcaatcatgttagtcgaataaattgaagctctgatctgcttgggatagttataaaagaccagcagatctggttctatgtctttcaagcttctgataacatggctgtaaaccttgccccatttggtatagaagtcatgcaggacagctgtggcttcttctttgtttgtctgttgatgcacctgtttgaattcgttcatgatcttttcacgatcgtcgacgcgtactttagcgcagatattgcgcatgacatgaaccaaacagcgttgaaaatgagcttttggataagtctgagctaaggctgttttcatgccaacaacaccatcagaaagaaaaagctcaacttgctttaagcctcgggatttcatgttttgaagcatatctgtccagacttcaatgttctcgctaggcgcaatgcagtagtcaatgacctccttgtgcccattaggcttgatgccaatggcaatatagactgcttcacgctcaaatgtttctcggcgcaaaggaaggtatgtcgcatccaaatagacgcagaaaaacttgtcgcttagcttgcgtttgtggtaagcctcaacctttggaatcatctgcttggaaatatttgatacctgagctggactgtaatggctgccatacatcttttcaattagatcggctatttccctggtggtcacgcccttggagtaaagcttgataatcatgctttccaagatatccgagtgctgcttgtagtcaggcagcgtgtgctgatgaaattgaccgttgcgatcccgaggcacttgcacttcaattgggccaaattgcgtatcaactttgcggaaataagcaccatttctagagttgccagtattccagccatttctggcatagggatcatagcccagaaaggcagtcaattcagcttctagcaagttattaacagcctgttgtagttctttgcgcaataaatcatttattttgtctggattgaatagagcttgagcaaaatctttggtaaaatcattcatgaaggagttcttctttctgtatgtgtttttttgttcaaaccaatcatacgagaaaggaactcctttttctaatgtttaaagaaataaatttaaggaatcattcatccttacacaaactattttacagtctcggaatatgagcccaatgataaaagaaattattaggattatctttattaatatctagcaaacatttaaagcgagttaagaaccattcctctaataagttttcactggcatcaatatagatggatagatctatataatcactgataatcttctcttcattttcaggaatttgcaaaatatcgattccttctaaaatcaaaatatctggattggtaatgctacgatatttaccaggaactatgtctgaaagctcatgtgagtatacaggataggaaacttcctctaccccatcacttacttgagaaagaaaatcatttaatagtgatacattgtaactttcaggaaagcctttgcgtgacattaaattcttttgctccagtactttgttgggataaataaagccatcagtcgtcaatgattgaacatctaaatcagagtaaaattgactaataagagtctctattactttagcagtcgttgactttcctgcagcaactgatccagtaattcccaggataaatggctggtttaaatcagcactcttaatgtaatttgtctttaatttagagaacattttcttattttgaacgcaaatcaatatatattgaactaataggatatatacttcttgaagttcattgactgtaacctgtaacttattttgatcaataaaactttttaatagttcataagaaggaagctcaatcttagagtttaatttagtccagtgattacggtcaacagtaataaaattattcatcatttacgctcttttaagtaccaaattaagaggtgtaacaattatagggacaagaattgcattaaatatcgcttctaccaagccgttgaaacctagagcagtgactagaattaccaacaatggagttgactgacaaaaatgccctaagtaacttgttaaggtgcttgaattagacataaacattaaatcggtaagtaaaattacaagaatagtgttcgtcagcgaagcaactgctccactgagcatataccctatcttttgaatatgtgcatccctatctttaaacttctgactaattaatccaggaaagaatcctgctagaacactaggaacaagagagattactggattttggaacaaaagcaagctgaccatatcccctggttgtgtataggccacaactaaacgagtaattccccaaactaatccaaaacccaatccccatttcggtcccattaaagtcccataaacagcaatggttaatggaatagtagtaattgcaggaagactaggaagaattcttacatacccaacattcggaacaaatgtctggataaaaagcaatgcaataaatacagctgtgatcgttaaattggtaatttcttttctagtcttcataatgatacgctccttgccatatgttgatttttcattcttattagagcacgatttacacaagcaggaacagcatctgaaatatcgcctccaaatagcataatttctcttacaatactagaagatatgtatgaacattcagggtttgaaaatagaatcaaagtttctatattggggtccattttcttagtcattaatgctatttgttgttcataaacaaagtcctcattatttctcacatcacgaacaataacatcagcatttaattcatgaaccaaattaacagttaaatcactttgaacaaggctcacggaaacattaggataaacagacacagcgtctttaacaaattgatatctttgttgaggagaaaacataccatttttggaggtattatttgaaacaacaacgactaacttatcaaataattttgaagcacgactaatgatatctaagtgaccattagttattggatcaaagctacctggaaatatagctttcataatgattcttccttaatttttaatcaattgatatctttttatatttagaaaagtatttcaaaaaccaatttttagcgtattctactgttggatcttcagtggaattcatagtatgacaaatcgatatcttccaaggaaattcaggtgtaatttcagcattctttattgcatgatcactataattctttcctattggagcagccacaataccaattaaattcttatcacgttgaactaaatttaaaatcaaatcccatgattgtgtttgaagaaaataattaggtttcagcctatcacctttaaatcttttgttcaattgaaaggtaaccataaaatcatctgtcagagtaacaatcttttctttttctatttcagagaatggaatcggaccagtaaaatcattaaaacgatgttctttattaaaccaaaccctaactgtattttcgtatattaaatcctcataaataccttcaacagtcgctggagaaacaatcacagctagatcaatatcacctaaaatcaacatcctttgtaattcataagctccacgctcgataatttttagttgaatgcctggattttggttaataaaggctattaacgcatcattgaacacggtcgatataataactggtgcaatacctaatctaacagttccgttactattttctgataattcatttagtttcgaaaccatttcaatatattgttcatacacttttttagattccttaactaaagttataccgtaacgtgtcaatccaacgattttaccctttcgccgattaaagatttttacttgttgcttaaattccatatctttaatcgctttactaatagcgggttgagaaatatggaggacttcagcactacgagttaagttaaagtcattatctgctattgtgagcaaataacggatttggttaatatccaactttgcatccccctatgaattaaaacacttaactatttcttatcgtttttgatattcatgactggctcttgaaaaattctcggatccatctcctgcaaattgtcactaataattggcttaaattccatttgatcaagaatatctttttgtaaatcaatgcctggcgcaatttccagtaattcaataccgcctttaactagcttaaatacggctctttcagttacataccaaacttcttgattactgtcatatgcgactttacctgagaaggtaatttgttgaacatgctttacaaatttctttactttaccttcttggataatgtttaacttaccgtccttgatttcttccttaagtccagctgcagtgaacgtaccagtgaagacaatcttaggtgtatattgagtaatatcaacgaaaccaccagtaccggcaatcttaggaccaaattttgaaacatttaagttaccatattggtcagcttcagctaaacctaagtaagttgcgtcaagtccaccaccgttgtagaaatcgaacatgtaaggttcatcaatagtagcttgaggagcaatagctgtaccaaaactaccaccacctaatgaagtgccaccgaatgtacctgcttcaacagtagttacgatattgtcagataatccttcctctttcataaccattgcgcaatacattggatattgaccaataccgaagtttacacaatggtcggtatcaggattgaataagaatgcagctcttctagcaataaccttctttttatcaagaggtaagtccatttgcttaacgtcttttacaatattagacttaataatatctggattgtaaatgtaatcggtagtctgtttagtcatttcaggattatcagtcggaactacataatcaactaaaacgccaggaactctgacggcctttggatcaagactaccagccttaacaacacgcttaacttgaacaattaccttaccaccattgttgtgagctgccatagcaacagcagtaacatccatggttaaaggctcatcatcaaatgtgatattgccgttttcatcagcataagtaccacggaaaattgatacatctggctttggtgtttcataagctaattaatcttttccatgaatcttaattctatttaccaaagtagaattctttgcagcttcatttaaacgaccaccatcattttctgggtcaacgaaagttcctaatccagtatgagttactagaactggacggtgagcagctgcatctctaaacaattgtgaaattgtaccttgtgggaaattaaaggcttcaaaatcattatccgcaaccattggtgcaagctttggcgctaatgacccaagcccaccaactactcgacggagcattcctttttcagcaaagttttcaacggctgagcctttgttatcaccgataccacatccataccaaacatccaaatcctttggatgtccagtttcttggtatctatttttcatcatttcaagaatttcttcagcgacatcagtgccaaggcagccatcaagagctacactagcgttatctgggaccaattctgctgcagttttactgtcaataactttaacagacatagatttatcctcctatgtttaaatctaactaactacgtttctactgaattggaaaccagatgagtttaataatatgtatgagagtatgtttcaaattagtagaattttggaatcatttaattccttgacacttataaggtaccgcttacatctagcattgtgaaatcattaatttttagcattatcataactattggttataacttataataataataaaaaaggcgaaattacattcgcctttatttaatgcttgattataaatattttatgtattaattccacagccataaaatggctttaaattacatgatttcgatgtttttattcaatactttttgagcatcatccattaaatctttaacaatttctgcagcaggcttagattctttaattagaccagcaacttcaccagccataaagaaactcttatcagggtcatcttctcttacaccaacgtatagtcccttgttcaatgctgaattaaattcatctcttgatacgcctgtcttttcaagttcaaacaacttgccagcttcctcattagcaataccacgagtagcaccacccttgatagtagagccaacaacagcagtaccagtatcagtagcatcgatgacagctttacgccagttatcacctactgggctttctttagcaattgaaaagattgtaccacattgtacaccttcagcaccagcaacaaatgcttcaacaacaccacgaccgtcaccgataccgccagcagcgattaatggaatattaattgcgtcagcaatttgtggccataataccattgaagtagtcccaccaatgtgaccgccggcttccataccttcaacgataactgcatcagcacccatttcttccattttcttggcaatcttaacattaggaataaccggcattaccttaattccagcagcttttaaatcagacatatatggttttggtgtgccggcaccagtagtaacaatcgaaactgtcaaatcttttgtgtaaatagttctttctcgtaaattgattttttaatcatttattcaaaataagattctaaggtatcctgaacctgaccaaagcctttatgaattcggttgaaatagcggtcattgtagctcattgcctggatgccaataaatgcatcaagcgactgttcagttggaaattctgccttaggcttagctttacgcttgatgacgttgttaaaggattcaatcatattggttgaataaattgaagctctgatttgtttgggataattgtagaagaccagcagatcgggctcaatttccctcaaacctttgataacatggctataagctttattccattttgcataaaattcatgcaagacagctgcagcttctttttggcttgtctgttgatgtatctgcttgaattcgttcatgatcttttcgcggtcatccacccggactttagcacagatattgcgcatgacatgaaccaagcagcgttgaaaatgagctttaggataagtcctggccaaggctgttttcatgccaacaacaccatcagaaagaaagagttcaacttgcttcaagcctctggacttcatgttttgaagcatctctgtccagacttcaatgttctcactaggagcaatgcagtaatcaatgacttccttatgtccattaggtttaatgccaatggcaatatatactgcttcacgctcaaacgtttctcggcgcaaaggaaggtatgtcgcatccaaatagacacagaaaaacttgtcgcttagcttgcgcttgtgataagcctcaaccttggggagcatctgcttggaaatatttgatacttgagctggactataatgactgccatacattttctcaatcaagtcagcgatttctctggtagttacgcctttggagtagagcttgataatcgtgctttccaaaacatcagagtgctgcttgtagtcaggcagcgtgtgctgatgaaactgaccgttgcggtctcgaggcacttgcacttcaattggtccaaactgggtatcaaccttgcggaaataagcaccatttctagaattgccagtattccagccatttctggcatagggatcatagcccagaaaggcagtcaattcagcttctagcaagttattaacagcctgttgtagctctttgcgcaataaatcgtttattttgtcttgattgaatagagcttgtgctatatttttggtaaaatcattcatgaaggagttcttctttctgtatgtgtttttttgttcaaaccaatcatacgagaaaggaactcctttttctaatgttttaagaaataaatttaaggaattattcatccttacacaaactattttacagtctcaaattctttacaatttcctgttagaaaatcattattcaagtagataaagaagacattaactataagaaaaggcgtaggttcatatcacaacctatgcctttttcacactataataatatttttactttacgctatacttttctttcccattaacaaaagtctttagaacattaagattactatctagcacattaaaatcagcatccctatctggcaggatacaaccacagttttcatttagactacgtgcaggagtatatgttgccatcttaattgcctcatatggcttacatacttcccaatttactaagtttcttactgctttatccaaagtcaatgtgctgccagctaatttaccattttctaacaatgcaatgtgattcctaactgttactttcataccactaagcacatattcaccatcaggcatcccaccagtacgtaagcaatcagtcattaatacaatatgattaggtccctttaaatcaaacaacatctgcaaaatgatcggctttatatggtgaccatcagctatcatttcatcaaatacatcgtcagctgttaatgcacagccaataatattaggtgtatgctgagataataagttcataccattaaacgtatgattaaacattgtagctcctgcgtcaagggcttttcgtgcttcttcatatgttgcactagtatgtcctaaagaagcaactacgccttttttaacgatatgtctgacaaattgtgggacattttttcgttctggtgctagtgatatctttctcagcatcccatcagaatctctgtaccacttatcaaattcttcaattgaaggatcctccataaactcaggattttctgcaccgccatgttctttagtgaagtatgagccttcaaagtgaatacctaatatctttgcgcctttttcctgccctttatgtgcagcaaacgttttacaaatttcatctaatttctcagatgaagtagttactgtggtcggcatccaacttgttacaccatattgaagaagtttttcagaaattcttgaaatctaaaattgcagcactttttggtttttcatcttcagaataataaaatccaaattgtccattatcttgaatttctaagtatcctcgttcttcaacaccatgatctaaataaaacttctttgcatgaataaaatatgacattttatacctcgctttttctataaaaattcgactttataaccaaaaataaacaagctacgtctgccttttacaaacgtagcttgttttgggagaggggaaatttataactaatcagaagatcatttattcaaaaacactcgtaaatgtcttagcaatttgcaatggtcttgtaattgcaccaccaataacaattccggctggtccaatatcaatcattttctttaattgttctggactgtggatttttccttcagcaataactggcattccagcatcaaccaaagctttaactaaatcataatctggatgatctgaaacaggactttcttcagtgtagcctgacaaagtggtaccaacaaagtcaacaccagcatcataagcattctttgcttcttcaaagttagaagtatcagccattaataaacggtcaggatatttagtcttaatttcatcaataaattctgcaacagttttaccatcatgacgtgggcgcaatgtacaatcaagtgcaattacttcgacatctgttttagctaattcatctacttccttaatagtagcggtaataaatggcttctcaggtggatattctttcttaataataccaatcattggcaggtcaggaactacttccttaatttgcttaatatctctaatggagttagctctcaaaccaactgcacccgcttctttagcggctttagccatcagaggcattatgccaccctcttcggtgtaaagtggctcgccaggtaaagcctgacaagaaataattaatccattatgaactttttgaataaactcttcttttttcatttttatctcctaaaaatttaccttattctaaagcattactactagtgtccggtggattttctgggaacttagtatcaaatagccagttaaatgcggcactatcaacataataaaacattgcttcatgaccatattctggtaacagcatgtgttttttagggctttctatcctattgaaaattgcaaactgcgttgctggaaaacaagtatcatcttcaagtcctgtaaacattaaaactggacactttattctatgagcaaagtttttaacatcgatataagacagagtacgcatcaacttgtcttccgtcttatgaaatggatcataaaacttaaaatacctaaataactcatcatatggcaatcctcgatcacccatttctagtacatgcttgaaatcagaaagaaacgggtattgagtagcacattttaatacgtggatttaatgccgcagcaatcaaagataaagcaccaccttgagatccaccccaagaatatagatgttccttgtctacacgtgacatatccgcgactgtttcaattaacgtgtatacatctagatatacatttttataaaacagatgatctggtccatccactgctccacgaattatgtggcctaaaacggtatttccagcataagtaccgttatcaaccgactgcccttgttggcctctaacatccattgcaacaacgcctacacctatcgcagcatattgcatgaaatcaacccaatcgagagcttgtcccatgtaaccatggaaatagaaaactactggaatatttttttcatgtgctggaaaaatgcatttagcatgaactattccgttatcagtacctttgaagaacaaatcataaaaaacaacgtttttaatattatcgccaaaatttcttttaattaatttaaatggctttgcttctatctttttgatttctttgctccaaaaactatcaaaatcatctggaacttctaatctacctcgatatgactccatatcttttaaggacattgaatctttcattatagtttcacctttttcaactaatccttaaccttctcattgatagttttagcagttaaacctgtgatatcatgtgcatattttggagtaaccaaaccaattaaccaagcaattacgaatgaactaatgaaggctacaattggttgtaccaatgttgcaacacccattacttgacaccaataagtaagagcagcactaattaatacgccccagacagcactaacacggttggctgacttagtaaagataccagcagcaaaaataccagcaactggaacaccaaacaaaccagtaattgaaaggaagatattccaagtttgagatgcattacccatcaacaagtaaatagcaattcctaaactaaatacaccggcgatgacaataatgatacgagctagtgtaacatcattcatcttccatttcttatcaaaatatctttgcttgaagtcagttacgaaacatgaagaaatagcattcaaacttgaagcaatagttgactgagcagcagcgaagatacctgcaataattaaaccggctaaacctgctggaatcttggtaattacaaagtatggaacaatagcactagtgttaaaaccttttggtaaacttcccatcgtgtggtaataacaatacaagaaagtacccataccaaagaatacaaaaatagttacaattgctaaccaaccgtttgtccaaagtgacttggcagttgctttaatacttggagtagtctgataacgctgaacaacatcttgactagcggtatattgatacatactattgaagaattgaccagcaaagattactggaatgaacatagctaaattgttaggattccaatctttagcagataagaatttagaattatctacagcaacttgtgcgatcttcccaggtccaccagtatatacgactgctaaaatacaaattaataaagcaccaccaaggagaaggaaaccttgaataacatctgtccaaataacaccttcaataccgccgaggaatgcataaataatacacattgcaccaactaaaacagcaatcaatattggattaatatttgaaacggaagtaatagccaaaattggtaagtaaataacaatggctactctaccaatgtgataaagcataaatagcaaacttccgagtgaccgcatcactggtccaaaacgcttttccagatattcataagcagtagtaacctgtaattttctgaagaaaggtacataccatttaattaatataggaataattaaataaattgttaacgtcccaatcgaataaccccagtcagttaaaaaagcttgttctggtgttgacatgaacgtgatcgcacttaaagtagtagcccaaatactaaatcctgcagcccaagcaggcaccttaccttcagctttgaagaaagaatctgtacttttacttgcccgtttagtaaagtaagcaccaacgcctaacatcgctagcaaatatgcgattaagacgatcctgttccacataccgaatcctgttttcgacataatttttctccccttttatttaattcatttttacttcttttctttgtgttcgcattatgaaaagtttcaatataataggcgcaatcaatgttgtgattactgtgacaacaatcattgcagtatagtgattttgatctattaattgtgattgaagagctacattagcaacaactagtgccatctctcctcttgaaaccatacctgcaccaacaatatttgcttctgtccaattaagatggaacatctttgctccgataccacaaccaatttgtttacccaagatggctataattattagtaaggcaataaacaataagtccttacccatgccattaaaactaatctgtaagccaatacttacaaagaacacaggaatgaaaactgcataaccaattggctcaatttttgttgataatctgtctgcataattagtttctgaaattgctaaaccagcaaaatatgcgcctaaaacatcgctcattcccattgcaactgctaaggcagctgcaccaaaacaaagaatcatcgcaccagctgtatcactttcagaagcattaagatcactaaaaatatctaagaattttggcacaacatacttaccaataagcaaaacaatgataaagaataataccatcggaatgatcattttaatgattgatgtatggtgaccaccaccgtagatactggagcaaattcctaataaaatgacacagataatatcatcagcaacagcagcaccacagataattgcaccttcacgagtatttaaacgattcatttcttttagaacttgaaccgtaatacttacagatgttgcgcttaaaactaagcccataaatatagatgcttttactgaaaatccaaaagccgtatggcacagaagatatgctgtaccagttggaaaaattactcctaaagtagctacagttaaagctggagcccaatatttaattaataatttcaaatctccttctaggccagcaatgaacatcaaaacgattacacctagttgagaaaaataattaatgaatgtggtgggctgaatccaatttaaaatagctggtccaactaaaatcccgactaataattctccaattacacttggcatttttgccttaactgaaaagtgtgccgcaattttagttaatagcagaatcaaaaatagttgtacaaggtacgtcatcaaagtcacctaccgcatgtctataacagcattgaccttgtcaagttcttgttcaatcttgttatcatcaatgccatattctaggaagattggaatttgaggatcaagtcctaaaatcattggttcccaatctgtagttccttcacctaacatcacagtttttttattcttaatatcctttagatgatagttagtaaccttatcttttaattctttaaaggcaacttcaggcttttcaccaacccagtaccaattacctgcatcataagtgaagccaatattaggatattgatttactgcttcaagacctttaagaacagtacttaaatagcctgtttcattagaaagattttccaatgtcaaatcaacgttagcatcttcaagaagcttcgcagcatcctcaatttccttttggtcaacatctttaacgtcacctacgaaatacttcaaatgcttcaattgatgcttttttgccatttcaacattgtctttcaaactgttattgacatgtccatcaatgaaaaattgttcaggaactgaataatacaatccccaactgttctttttacacaatgctttgattgcttcgagttcgtcgtctttggtgttttctttaaagaattctccacgaacttggatattgtcaattttatctttcaaatttgaaacatcctctaagcaatcaatttgactctctccgctattcaaacgatcaacaaagattgccgcattcactgaaactttcatgacttgcctcttttcttcaataaacgggattaaaaaaaccgtacaattatgctcagcatttgcctcacataagtacggttgaattttgctattagttaatacacctctagcatacacgaaaacaattttattgcaagcgctttctagaaattaattttcaaaaatgctagaaatacctccataaagttgtgcatcattacctaaagaagccatctttaatacggttttacatagatttggcggtaaaatctgattcaatttttcgtccaacaaatcttttaaataatctccctgcttggaaacagcaccaccaataactaatacttctggatcaagaagtaataatacactgcttaagccctctgcaacttgcaaggcccaagcatcaataattttcttttctctaaggcttccttttttggcacgtgcaaaggcttcaataggatcaatacctaagggttctaattctttttgtaatgcaatggttgatgaccgctgttcatagttagttgatgttattggatcaaataatgtatatcctattgaattacccgtttgatgatatccattaaataaatgtccatctgcccaaaatgcaccaccaattcctgttcctaatgcaacacaatagatagtactagcatttttaacacttccagctaatttttcccctaataaagccgcactaacatcattaacgacactgacaggaattttaaatgtccgctctagctctttcttaatgggagtaccttgatagtcagaaatagttggtccagcatacattatgcttccatcgtctccaacaataccggcggtactcacaccaatcccatctaattgatacttctgtatcatctctttggtaactttaataagtgacttcaaaatatgtccgtccttattatgtaatgtatcaactttgcctctatctgaaatctgaagattctcatctacaataccgtatttaatcgtggttccgccaacatcaaaagctaaatatttcttactcatttggttcacgccttcctgtataatcaagttcttatattaagcgctttcatagtatcatttaaaaacaattttctcaaataaaaatttagaaaataattttcgtgctctgtatctcttgatacacctacgctttgttcaatttctgaaaattattttcgcaatttagagttgcgtaaagcgttttcatgttctatactgcaggtgttggttgaatttgccattagttatacagtaattaaaaaaatattattttattttgactaaacggaggtcaaacaaatgcaaaaagtttatgcagccttaatggtttcatttgatgaagatggtaatattgatgaaaaaggtactcgtgaaatcattcgtcacgatatcgatgttgaaggtgttgacgggttatacgttggcggttcaactggtgaaaactttatgcttggcttagaagaaaagaagaagatcttcgaaattgcttgggacgaagttgaccaacaagttgacttgatcgctcaagtgggtggcccaaacttaaaagaagctaaagaattagctaagttcgttactgaattgggttacaagacaatttctgcagttactcctttctactataactttaccttcgacgaaattaagcattactacgatgaaatcgttaaggatgtagatgcaaagttattgatttactcaatttctgcattaacaggtgtttcactttcattggataactttgctaaattattctcaaatccaaagattatcggtgttaagtacactaatgcagacttctacttacttgaaagacttcgtgagcgcttccctgataagcttattctttcaggattcgatgaaatgttgttacctgctttaattgaaggtgtcgatggctgtatcggatcaacctacaacgttaatgcaagaatggttaaagaagaaattgctgcttacaacaacggagacattgctaaggcacaagaattagaacacaagaagaacgacattatcactgcccttcttaataacggtatttacccatcaattaagttagtattgcaaaagatgggcgtacatgctggctacaaccgtgaaccaatggctaaatacactgataaagttattgaaggcgctgacgaaatctacgctaaatattttaataagtaattgcttatttgccaaaaaactacaaatttagcataattaagcggagaaagattacaaaatctttctctgtttttttgatttaacacattaagaaggttttcaatatgacgtttttaactgatttacaaaataggctacccgatttacctcagcaagaaagaaaaattgctttatttatattacaggacccacagtttattcaatcagcaaatataaatcaattagcgtcaacaataaaagttagtaatgctactattactagatttgcacgtagagttaactgctctagttttacagatttaaaagtcaaattggctgctgctgcagcttcttcacaagtaaatactattactaatcaagataactctaaaacgaccgctcaccaagtatatgatttttacaatcgagttctatctgaaacacaaaataaacttgatataaaacaattaaaaaagataatccaactcatcaaatctgcaaagagagtttatttttatggtatcggttcttctggatataccagcttagaagctactcaaagattactaagaatgggtatatctgcgtttgcggaaacagaaagtaataatatgtttatgactagcagtatcatttcaaaagatgacctgattatagctatttcttcaacaggtagcacagattccttggtaagagccattgaactagcaaaaaagaataaagctacagttgtagcattaactagctatgacaatagcccattagctcagcttgctgatattgtagttggtgttcaagatacaaattatattaacgacgctcggtttattaactcacagttttcaataatgtatgtaatagacgtaattactacgctacttttaaagaataataaatatcacgatagaatgactcgaactattacttctgtcttaaatgaaaaatacgatgcatacaacaaatagcctgatatgattatcgtttgttatatctgatttaactatatttcatagatagtattaaccaattaaccttatatacctgatataataattatggtgaagagattaattggataattcataatacttcgcactctagaaaacgtcttctgttattgaaggcgtttttgttttgttcaagtgttttacctgaaatctaactggatatttttaggtattagcacaaaacagaaaaaaagccattgaaaacttgttttttatacaagtaatcaacggctatttttctatccaattctaacgttcttaaaatcgtatggaacgcctgtagggttaaaggaaacgccctttacggtagtctttaataattgtggcttagcaacttgaactaatggaatagttccttggtctttcatcaataccttctcggcttctactaatcttgcccagcgttttactggttgattgccatatacgttttctgattcattcaacagcttgttaaattgattgttattccaaccattgttcaaataacttgatcctttttggaaaacgtccaagaagttgattgggtcgccaaagacagcctgccagtttttaattgtagcttggtaattaccagctgtttgacgtgaaatcaattgagtatatggaattgtttgaacagaaatttgaacacctggaagttgatctagcttactttgaagaaattcagctgtttgctttgaagtatcgtcatcagaaactaacaaggtaattttaattgagttagtcttagattctttatacccttcgcgaagtaattgcttagccttagcaagattatacgatactgcactcttaacgtaagcatcatcttcaaatggtgttcctgtcttaggattattgcccatacctgatggaacgaagcctttagctgggattgaaccgtcttttaagacattatttgctaattgtttgcgattaattgctaaagaaaatgcctgacgtaccttaagattcttgaatgctggaaccttattttcgttaagttccaatcttttaatcgctgaagacaaacgtgcatggtagcctgctttattcttatttgcggcaacttgctcaccagtaagtccagtctcatctgccttacctgcttcaaaaagattatagctagtcgtagttgattcgctaacctgttcattaactttatttaatttaacatttttagcatcccagtaattcttattcttaattaaagtccaagtcttgttgttaccattccatctagtaagcgtgaatgggcctgaagaaactgtgtatttagcttgcgtgccgtataacttgccatatttttgcaccactttttgattttgcgggaaaaataatggccacgacaataaaatcttgaagtaaggcagtggtctagttaattgaattctcaaatgatatttagaaggagcagaaacacccaaggtatccggagacttttggcccttactaattgcttgcgcatttttgatctggtaaagatagaatgccatctgagacttagttactggattaacagtacgcttataagaatatacaaaatccttagcagttaatggatcgccgttagaccattttgcggtttttctaagataaaaatcataagtcttcccgccattagaagttttagccttagtagctagagataattgcggtttattgtttttatcaaggcggtatagtccgtccccggtattaagaagagcttgaaaactggtagtatcagttgccaaagaaggatcctgcgtagaaagctgtgtgatctctgaccaatttaaaacctgcttttttgaaacggtattactatctgattgcttaccacaagcagctaaggttgccgtagttaaagctattaatccgaatgaaacaacttttttatttattctcataaaaatctcctttgctaaaaacggtaaaaagaaaaacgccttactagatcaacttgatctaatagggcgttcagtaacgcggtaccacctatctttatggaaaaccaccttgaattgcgtacggccgtctggcgatacgttaccgctataacgggcggacccagaagctactaaaaacttcatagcttcaagctcaaaggccattttcaaaagtagatcgatcattatctttcaccaagtgataactctctgtagaaggaccgccaatttactttccttatcatcgctaaataattaataattatgttgattaagataatagtctaaatcattttaaaagtcaaatataattttaatgcttttcattattttactaactattcttcagttagtcttattgactcatttcccaaccttcgcgcatatctttaactaatactgaagcatctaaatcaaggtctacctgttcatattctttttttaattctggatgtctctcaatatctttcttgatgaactcttgaatcttactcatcttatttcaccccatattggccttcatatgataaaagaccgttgatgtcaataactttaccgtagagagtatcatcttctaatgaatactccactgaaccataataacctttatatgataattcttttttcattagattttacctcataagttaatttcgtaaatactaaatcataaatctacagtttcatgatccagtgtttttcattttgtccaaatctacttaagttcaaactccaacctaaccggattatggtctgcatactcaaaatgagtattaatgttatacgcctttgcttgcacgtttttcgacacaataaagccatcacaaatggtcatataattaactttaggatcatatttcatgtctgtagcacgaacagtcgcaacattttcgcgattttgcgccttaatcatagtgaaatctttaggcagcattttttgatcaagaacggatacccaactaggaatttcttcttggtgctcaaaatgagtcatcatgtctttccctaacgcatgattaaagtcgccgccgacaatgacatagttacctcgtcgatattctttttccatcacagaagaaatcagtttcatctgtgccttacgcattttaccgcccttatcataagcagacatatgtgagttaatcattaccaaatcttttccattagttactggaaagcgcataactacaaagcaacgatctaaatcgacaaatttttcaataggcccactagaaacaggatattttcttcttatggcactatccatcttatatttgctcatactcaacaaccctgaacgtacagtgccatgaggattgttcaatggaaccgctaaaaaagcagagtggaaattactagcaaaagttgaatccatttttggaaaatcatcttcaacctttttcacctgattaacgtgaaagctacgagttgaatcagtatcaatttcctggaaaaacatgcagtcagggttctgctttttcattgtttgaatgacaccattagtggaatcaagaactgcttgtttagatattgctgtccctcgatgcccctgcggtttcttgccatccttcaactgacctgaatccataaagaagtcgaaatcatgattataagcaccaaagccaacattataagtcgttgtcttatagctacgcccccgcttttaataactgagactgattgttattaattttcaatctttgattatcaggaattcgataataatgtagagacaaatatatataatagccacagaagataattacacatgccagtatcactgacaacaacgctaatcccactttttttaagactttcatatttactcttttctaactgaatcatttttagctttacttaagatattatagtggtgtaattattaaaaaagaacccacttatagtgagttcttcttattagtcatgaaaatcaattgtagtcatagtaaaatttttaagccgaaaataattaggtacttgttttctcctcttcggcacacttccaaattagactttcgtttctcttaagaatatctagattatttctagtttcagaaggtgtaaagtcgtagttgtaaatttctttataatcaggcaactcatatctggcttctttaaatccataatctgtcggttgttcaaagtggaccaaaagctttttaccaccctttacattatcgtctaccattatttgagaatatgtaattgacaattccccaggaaattctgcatatggatacaacatgtggtcttcctatacaattttataatctgcagtatagttaataggctaattcagatcgacaaatcaaaaatttattaataatatctactggggtgtttttcttaaaagttaaagcgacttctgtatgctcattattagcccactcttctttttctatccaagggacaatatgatcattaaaatatagtgtttctttattcggcattttcaaatcatttagcacttgcattttctagcatccccctaataattgtattcaattctttatcacacgtatttcctatcacagaaaactcagctactacctcatttattttatgttctttaaagtaactatcttctgcatacgaactgattactttcctaagataaccaggatactgtagccttatataatgctcaagtttagaatcaaaaaacatctttgcttctttaatatatatcattatacttacttttatgtactttataaaagcttttaactgcatcccaatgtaatttatatccatattcatgccacaaaattcctctcatatctttagcaacgaaataacttgactttaaatgcgatttaacaatttgatgagtatagatacctttattaacataaataacatctttttcgcgatcgtaagcagctactaccttcaaatattttgaactaactattactaaatcaggaaacatgtatttattgtcatcttgtagtgaatccattattaacttagtagcctttctacttttcttatcatcattttctctccaaactttcaaattattgttgttaatagccaaatgagtatgaacacgacacacttgattttcaatatttttaaaacggtattccttcttttgagctaaaaaatccatataattcctttccttattactcaatagtcagttcattagtctgcccaaacacttttacaattatatcaaacatatgttttgaaaggaagtgccataattttagaaatttattttcacaacaaaaaaggcgatatcacaaagatatcgcctaattctatattttattcacttttaatactgtagatcgctaaattgcttgttggagttttgcttagccaaggcttcgctcttccagtagacagcattagttgttcccttagagttagctgaaacaattacactttgaccattttcagtatgcggtgccaaatatgtactgccttgacctggttcttgacccatattagtaaaactatagaaattaattccattaatagtagcttgtttcatatagcctgaactagttgatgaacctgaatttttagcctttacatccatgctaaaaccagcttcatcattgatcttattagcagttacagtcaaagtatcgatattgccattgccagtatctgcagtgtaccaagtaccttgcaagcttgatggaattacggcactagcagattccttagcaccagctgcattgtcattatcgccttcaagtttaacatttagtttggcatttttagccaagctttgaactagatcaacatcattatttttattaatgtaatcaactacatcttgtaaagttacagtaccaaggtttctttgcttaacaaaaatagtaattttcttttgtgctccatctccgtttagcatgtaacgagcattactgcttttaccggtaccggagacctcataaacatatcctgagtcatcagaagtaatacctgttgcggctttggttctgaacgcaacacctaaattaccatttttggcagcattaactgcaatttcccaagtgtcgccatacttttgtgcagcatagacagagattgcactagcctgcgtcttatagtccatattctcagcagataattttgctgagttttgactgttacttgattctgaggtgccagttttttctgagttactcttagaaacttgacttgatttttctgactgtgattgtgaattactattaccttgtgtactttggctacatcctgctaaagttaaagcagctgaaattgcaaccaaaacagttaatttacttttcaaaaggaatccccttttctttcaataattctatctctttgcttaatagtattataaaaaatacgatccgccaacttcttacatgattattttacaaaaattatacttcttgttcattgcaattattttaatacttctttacaaatattaatttaaagtcttaaattctgcatttcggtgttccttggctatcttggtgctcttccaataagtagccgtataatgacctgtatcaacgctataagttactactgccgtattgccattatctttttggacagaataaagtaagccaaaatcttgagcattcaatgtttgaacatgatagcaatttaatccattaatattttcgatccgagctctagcccactttttcgtttgatctaaggattctgctgctacaccagaattagaaatatgatgaatttcttcaccattaacagtatgatcagtaattactaacttctttcctttatagttgtaccaagtaccccaaagtctcgttggaactaatgctaggccatcgtcacccttaaccccatatttgtcagatgtaacttcagcagccaaagtagtcttagttgctaatttttctacagattttacttgattatgttcacttaaatatgaagctatttcagataaacttgctacacctaaatttttcttctgattataaaaatatacggtttcacttttcattgtataaaaagcattattttcttgaccattgccagttacttcataaatgtaacctctacctttttttatccaattaaaaccagttcgattttttacactaatgctcaaatgatttttcttggcatcactatatgcagtcttccatgcatccccatatttcatcgatccataaattgagattgcactagatttttcagtatctgacatactcttaacaattaatcttttgggagtctgtttctgagtcacaccagatttttcaatagtttggcgattattagtctgcttttgcgattggcaagcagttaaattgatcattgcagctatcaaacaaaatgctactaatgtcttatttctcattccatcgactccaatacattctcattaacacaaaagtatccctaaactaattagggataccagtccagtcattattacaattatatagcagtttgctcttctttgaagagaatattttttgatttttggtaaaagtttatcctactagatttaaaaacttatccataagttcacttatctaatcgtaattagactaattacgattagatatgcttttgaaaaatctatactttacaaaaaaatctcgtggcctcaatcaccacgagattttccaattacttatttatttttaccagttcatgtaacgttgacgttcccaatctgaaactgattgtgagtacttagaccattctaattcctttgattcaatgaagctgtgcattaagtgatcacctaatgagctcttaattaaatcatctttcttgaaggccttaattgcgttgtgaagagtagttggtaatggcttaataccatgttctgctctttcttcttcagtcatttcaaagatgttttcttcaactggcttcattggcatcttttgttctttaataccattcaaaccagcagttaaacatgcagcaagtaacaagtatgggttagcagtcggatcagctgaacgcatttccaaacgagtattgatttcaccagcacttggaatacgtacaagtggtgaacggttcttagcagcccaagcaatgtaaacaggagcttcaaaacctggaattaaacgcttgtatgagttaacggttgggttaccaattgcagtaatggcacgagcatgttccaaaataccattcaagaagtaaagagcagtatttgaaaggtggaattcgccatccttgtcataaaagacgttcttgccattcttaaataatgacatgttgttgtgcatcccgttaccagcttgaccttgaacaggcttagccataaagcttgcaaacaaaccgtgctttctagcaattgcacgcgttaccatcttaaaggtttggcatctgtcagcagtagtcaaagcatcatcgaatctaaagtcgatttcttgttgaccatcacctacttcgtggtgagctgcttcaacttcaaagcccatgccctcaagagtttcaacgatttcacgacggcatcttgcaccttcatcgtctgaagtcatgtcaaagtatgaagcatgatctggaacttcagtagtccaattgccatcttcgtctaacttgaaaagatggaattccatttcaaaaccaatatcaaaagtgtcgaatccagcttcattcatttcaccaagaacacgcttcaagttatttcttggatcaccagcaaatggcttgccatcagtggtgtgaactgaacaaatcaagcgaccaatcttaccaccgtgttcgtcaccccatggcaatactgtccaagttgagaagtctggatataaaaccatgtcactttcttcaagacgaacaaagccatcaattgaagaaccatcaaagcgaatgtcattagtcaaaactttatctaattgactcttaggtacttcaacggccttttcagtaccgttaatatcagtgaaggccaagcgtaaaaatctaacgtccttgtcttcaacttcttgcttaatttcttctgcagtatattgtttactcatagttaattcacctataaaaacaaaaaatattaaattggtatggtcctatgatttattcttatctcctagaactgtttaatacaatagcagaccaatttaaaaaagtcaaattggtctagtgattatttttaaattttattttttgttaaaaaatgtatcacgaaccgcgttaataatagctactttgtcatgcgcataagtcaagccgccctgcatataaaccgcataaggtggtctaattggaccatccgctgaaaattcaatagttgaaccggaaacgaaattaccagcagccataataatcttatcttcatagccctccatatgcacagcttcaggcgttacaaaggaatcaatcggtgagtttttctgtacttcttgcacaaatttaaccatcttatcaggatcaccaaaaataattgtctcaataatatcgcttcgcttctcatcccaagctggggtaacattcaagcccattttggcaaacaaagcagccgcaaaaatcatccccttttcagccataccggtaacattaggagccaagaaaaagccttcataaaagtcatgcaaattgccaatagtggcgccctcatcggtgcagcctggagcagtcaatgcaagttttgcattttcaaccaggtcctttttaccaacaatataaccaccggtcttagctagaccaccaccagcattcttaatcagcgatcctgccattaagtcagcaccatactcagttggctcatgtttttccgaaaattcgccataacaattgtcaataaagacaatactcttagggctgacccgtttaacaaaggcaatcatgtccttaatctgatcaactgtaaaggtctttctggtggagtagccacgtgaacgttgaatggcaacgatcttaggctgatcacgtttaagaaccttttcagcctcgtcataatcaactaacccatcatcggttaacggcacatatgaaaaatgcacgccgcgctcgactaaagtaccacgcttatcatcagtcaagccaatcactttttgcaaagtatcgtaaggctgtccagttaaataagttagcgtatcgccgtatttcaagttacctgctagagctacaaacaaggtgtgagtacctgaaacaaattgaggccgaactaccgcatcttcagtttgaaaaacttgagcatagatcttatctagcttatctcttcccatatcatcgtcgccatagccattagccccatttaaatcggcttcagcgacatcattagcttggtaagccgccaaaactttagccgtattatagacaatttgatcttcaatctcaaccagtttaggtgcgatctgttgatcaacttctttaacaattttttgtaatttttctggcaaattattcatttttccattccttgactttcttcaatatcttttgttcgcaacccggatcatctaacggatcaaaccaaactactggtaatttatttctaaaataagtcaattgacgtttagcatagcggcgcgaagctgtctttaaatcttcaatgcgatgctctagcgtctcttgcccttcaaaataagggaaaaattccttatacgcaattgcttgcaagacctgatactctcgtgctcgattttgataaataaattttgcttcatcgagcatcccttgctccatcatcttatcaacacgcaaattaatcctgcgatatatctcttgacggtcagaattcaagccaataatcaagtaatcataacggggctcgatctgcttttgttgctctgaaaactttttgcctgtacgctcaatcacagtcaatgctcgcatagttctgcgactattggctactggtattttttctgccgccttaggatcttgctcattcaagacctgccacaatttttctgcgcctttttccttgaggtagttttcccacttttgcgaaacgctacgctcttctggagttttctcgcctagctgcatcttattcaataaagcattaacataaaaacctgtcccgcctgcaataattggtaacttacctttttggctaatctcttcaatcgcttttgttgcttgatccacaaaatctttaactgaatactcgtcaaaaacggattgcgtatcaactaagtagtgtttcacttgcgcttgttcttctgcagttgcctttgcagttcccactgccacttcttggtaaacctgcatggaatcgccagaaataatctcgccgttcaaccttttagctaaatcaatcgccaagtctgtcttaccaatagctgttggtcctacaatcgctagtacctttttcatccccatcacctttcttaattttgatacaaaaaaagagcgcattagagttaccccctccaaatgcgtcttcttttcatttaatattttgacttcttagttcgaccatcccaagcttcaaagccatctttaagccaatggatagaaacaaaaccctttttctttaaaaaacgggcagctctcaaagtaatggtctttgaatctgagtaaagataaactggcaagtcgcttctaagctcagtatattgatacttaagcatggtatatggcaagttgcgagcgccatcaatatgcttgcgtttaaacggttctttttcacgcagatcaataatttgtgccttacgcatgccttctttaaattcttcattagtcaattcgccaccaattgatttagcttgaattttattccaagcccagataccaaccatgactaaaataatgactaataaaactaaatctaagacaattaaaaaactcgacataaactaaatctgccctttcataaaaacttacatctattatgataccgctaaactaatttactggctatcatttttcggatctttaagcgcctttttttgttcatttttgacttcaattcgatgttctcgactcaaaatcatcttggcaatcaaataatcatgttggtcaatcagaccggcacgattgatattgtcgagctctaaagccattaattcaatatcccaaattcttttgccaacatgaaccaaaattccgtatttttctaataattgttgtacatcgtagagagttttcattagaaattaattatcattcctgttctaaccgtccaaacaacatatacgactaacactgcagcagccaatacgcgccacttaggattgtaggtcttcattacacgatcgcccaagataatcgctaataagaagccggcaattaagccaccaatatgaccccagatatcaattccaggcacaaaaatatcaagcgctaagttaatcaatgctaagacaaaggcttgtcgacctaaaaaagcaatcattggattatgcaaattgcgcaagccaatggcagtcatggctccaaacaaaccaaataaggctgttgaggcaccagcacttaagccgcgatcagcactgaaagccaagctcattagattgccgccgaccccagctaaaagataagttactaaaaagcgcacatgtcccattaatggctccatatactgccccatgtagtaaataataatggcattagaaaccaaatgcatgatgccaatatgcaaaaactgggccgtaaataggcgccaccattggtgtccagccaccacggcaaaattattcatggctcccattttcatcaagacattggtattctctgagccacctaaaaacacttcaactaaaaagattattaataaaactactaaaattcctaaagtcacaaatgattgtgagaggttaatttttcgttgagtattcatttaatcccccttatcttcgtcattgtgactattttaataaattttatcaggagtaacaattgtttgaaccggaatatcggttttttcgataggccaaatgctagtatcgaacgtcatcttgctattggctaaagcaacagttttaggatcatgcttagccaaaaagcgatcataataacctccaccaaagccaagtcgaacatgcgaatctaaggcaaaggctaaacctggcacaatgactaaatccaaatcattattgattttcgcatcttcatcggcgacttcttccacaccgaatttagattttaccaatttgctcatatacgtatagcgtaaaaagtctaaagtatgattttgatcgcctcgtgcctttgccagataaacttcttttcctttatcccacaaacgagcaattaattcagaagtatctacttctagtggtaaagaagcagttaccccaatcgtctgacttcttctaattagatctgtagacattaatttctctaataaaatcgcatcttctgctcttttttctttagtattggcaaattcttttaatttactgatttgttcttttcttaattctgatttttccatctttttgtccaaaaaacaaaaaatagcaggcacgtaacctgctatcttggtttattacttagtttcacggtgaagtgttgcgcgtctttcaactgggcaatacttctttaaggataaacgttccggatgcttacgcttgttcttcttagataagtaacttctatcgccacattcggtgcattctaaaatgatgttatctgccatttttttcaccacctacacttttattctgactgtactagaatagcatttttcaagctgtttgaccagtattattctttattttgttgaatgaagtttgaaataatcttgtaccattgctttggcaacttgcaatgtgtatgttccttcaccatcagggtctaatcctgggaaaacaaccgccactgctaattttggatttttcgatggggcatagccaataaaggttgcattaatcaattcgatattgtgctttctattagggtgttcagcatcatagtagaaagtttgtgcagtaccagtcttaccagaaattgatggcttaacatttttcaatgggtgagcagttccccaaccatttgtaccgtgaacaacacgatagaaccctgtttgaaccacattaagttccgcaagcgtccaaggaattacttgttggacatttggcttcttattgtagctaatgtaaatcttcttgccatttttgctagttttaccaactgattgcacaatataaggttgcaatctcttaccaccattagcaatagttgacacatattgggctagttgaattggtgtataagcatcatagttaccataagctaggtcaagtacagaaccggaaagaatattacccttgtcattaaatgacttaccttcaattcctgacacttcaccaggtaggtcaacgcctgtcttttgacctaagccaaacatagcaaaattacgccgtaaaatgtcaaaggcatcgtttggcatatgaatgtagctcttcggtacataactagccttaacccatttcattgctaagtacatcatgtaaatattactggagacttccaacgctgtttcagcatccaatgaactgaaagtaccaactggataaactgactttttaactggtgaacctggcaaataaattgccgtatcaggcaaagtattgttttcgggagtaataaccttattaattaatccaccaccaacagtagcccccttaacaactgatcccataacaaaggattggttaattacacctaaagcattatcagtcgttttaccagtgttcgtgtttcgattaatcccggctacagctagcaaagcaccagtctgaggattcatcgccacggcataggcaccattagagtatcttgctgcaccgttaccaacagctgtactgtaaacccgtttcaaagtagcctgtacttgcttttgatacttagcgtcaatcgttaacattaagctggcaccggcttgaccattataaacagtcttagtctgctggatattaccattcgatttagtaataacctggttagtcgacttagttcccttcaaaagtggctcatattctttttcaagataggaagtacctacccggtcgttacgtgagtaaccatttcttaagtagtactgcaagctatcacttggtaaaccagatttttcagttgaaaccgaaccaatgatactttgaatagatgaaccatttggataagatctttgccagtcagttccgatacccacaccaggaagctctgataagtgctcacctacttgggcaatttcacgatcggttaagcctttattcttgatataaatcgtggataaagtataagcccctgaaatcttattaaagattaaagccgctgttttttgccgagtggttagttgaggattcattttttcaacataagccaattccgcttgatagatttcagctgaagtcttcttattgccatcagcatcaatcttggctgacttcggcaaagcattagatatcttagtattattatcttcattagctaaataataatctgctgccatttgctttatcggcttttcatcgctaatcttgatataattactcaaggcattagatatcttgtaaatatctgctgttgtagtcgaggcactcttagtataagtaatagcattggttgctttattacctactaaaacgcgtcccttagcgtcatacatgacaccacgtggcacttgatgcgaaacaacagttgaatcagttttttgcacttctgccttgaaacgtgaaccataaactagttgcaaataagccaattgcccaattaacatggcaaagaggactaaaattacccctagaatgattcgcattctaattggagttgaggaatgcttgtttgagccagtcccactattttttctaaaataattcacgtaaatcacctttattaaaactagatgtattttaacaaaaagtaaacatcaattctacaattcataagggagcttatataatttttaatgatgcttaaatttcttaactcacgacacattgcaattaatcgtaaaaatatttttttctggcttagttttttgctaccggctttgattttcttgagttactttttctacagcaaaaatggagtgctcactgtcgacttaggtcaacaatatgttgattttcttgccttcttcaggcgaaatttgttctcccatcccttgcgcttaatctattccttttctaatggtttaggcggttcaatgctagcaactgatgcctattatctctgcagtcctttcaatctactcttatttttatttccgcaacattttttgccacaagcaattttaattattatcgcattaaaaattggagcggcgggactatcttcctactactattggaagcaaaaaatcactaatcacttttacgctttagcggctagttcggcttatgccctttcaggctacgttattggcaatcactataatctgatgtggcttgattctgtgattttgcttcctttattgattaatgccatcgaccgcttgctggcccaacgaaaaaataagttaattttaattacctttttgctttggttcactaatttttataccggatttatggcattagcctttggtttgctttatctgttaagcaaaattttcttcatcaataagcaggagcgcctacgccttaactggatttatttaagaaaaagtatcgctggttcatttttagatgcctttatgctcttccccgttctgattgaaatgttgcaaggcaaggctagttctactgcctcatggaatttgggctggcagttttctccagttgaacagctgactaagttagccgaaggggcctataactttcatgaaatgcaggaagggatgcccaacatttatctgacaatgcctttcttgttgctgacaattttatattttttaagcaaaaagattaactggcagcgtaaattagcaaacggaattttactcattttcttaattgcttctcttttttggacaccactggttttactctggcatttaggccaattccctgtctggtatcctggtcgtttcagctttgtgttgatcttttttgcgctaaatctaggcgttattgcattagaacaaaaagaacgtatagcttattggcagaccggacttctgactctattttctttaggtttaattgtttatatagtatttaatgcctcacattttgactttctaactgaagatgcgcagattgccacgggagcttttctagccctcggaatcttgtttattggctttatttatcatcaacacagttttgccgcgccatttttttatttagttatcgagcttgagttaatcgtcaacctagtactatctctaggcaatttagcttatcaaaaaaatagcgattatcagaactttaccactaatgtcagccaagcagtacaatacgcaaatcaacatgattctggattttaccgaactgaaaagactttctatcgttctgatgatgatccttttagcgctggttattacggtttaagtaattttaattcgatttctgatcaaaaagtactcaacctgatcaacaatcttggatttctaaacaatagtaattcctacactaattttggcggaactactttgacagatgatttacttggaatcaaatattatcttttgcctaatgatgaaatcacaacgatcaagtctggtaagcaaatgaagtatgacaattccaaccaccgcgttgatgccagcgattatcatttgcaaaaacgcttttcccaactatatctagtgaaaaataatgccgctttgcccctactctttttaacatcacaaaaaacgcaaaaaatcaattttaactctctagatattactagtaatcaaaccaaattctttcaagcagttacaggggcaaaagtgcagctgtttaagcagatcaattggcctaaagcaaaattaattaatgtaactagtatgaaaaacgatcaactacaatataatcgtaaaaacaataagcaaatcgcacgcatcattttcaatttcaaaccacagactgatgattcttactacattgaaatgcccggtgagatcgatgataatgccatttcaatgacagttaatggtgctaatattaatctggcagtacgtgatcaaaatgcccgtctcattaatctaggtagccaccagcgtggtcaacggttgcaagttacttttgaactaaaaaaagataaactagaccttagtggcattcacttctggcgcttaaacacacaaaagctcgagcagattatacatcgttttaagcaaaaacaaccaaactttaaacaaacacctgctttgatcatcaaatctaatcatttcacaacgaagaagatgatgacattggcgtcaactattcctaataacattaactggttagttttagataatggcaaaataattaacaagaataaaaccttgttcatgaatgcttttttaaacttcaagttgaatccaggaaaacatcaaattacattaatttatgtaccatgggttcttctactggggatgttggttagcttaattagtttaacaattttattaatttgcaagaaaaaagccactgttagcgctaacagcaaaacttttactagacctactgtataaaaatataatacaatgtatacgttatcattcggataaattaatatagaaagaagatttacaacatggctcttaaataccaaattggtgttgatgcaggtggtacccactcaactgcaatcgcatatgacgaaactggcaaggaaatcggtcgtgcagaaggcggcccaggccaaattaacgctgactacgaaggcggaattaagaatatctctgacactatcaacgaattgatcgacaaggttgatggtgactgcatgcgcgttcttgttggtattgccggtctttcagttgtcggtaatgctccagaagttgccgcaactatttcatcaagaattaacaacttacctactcgtgctattactgattcacttttagcactttacgctggtcttgaaggtgatgacggtgccttagtaattgccggtactggctcagtttacaacggtttacaaaacggccacttaatcgcagttggtggctacggcaacatcttaggtgatgaaggctcaggttacgcaattgctcgttcagcaatgcaatctgctcttcttagctgggacaagcgtgaagacaacgctttgattcaaatgtttactaaattatttggcgttgaacacatggatgaatgtaacgctaaattctacaagatgtctaacccagaagttgcaggaatggctgttcacgttgcacaacttgctgatgaaggcagcgatgatgcaatcaaagttattaagaaacaagctcatctgttagcccgtgacatcatcatcggtcttgaccgttacgaagatcctaagccaatgaagattgctttaaccggttcagttttagctaacaacgaaatgcttagaggattggtagaagatgaagttaagaacaagtaccctgacgctatcttctcaatctccaacggtgaaaacgctcgtgccgtattgttcgacaagagtaaggactaccgttacttcactaaccacgaagaccgctaaattatcttttctgaatagttacaaaaagctcgaagttactacaatttgtagaagcttcgagctttgtttatgtttaaatttctgctggtgtattacgattaaagatataaatgtcacttttagttttttcccctagtattcataataagactacctataatcttttaaaattcttttaaaagcaaacgctaaaaattgatattttgtatttatagtatatagtactatatagataaagtaatacgttttgtgaatagaggttgtactatggctcaaattagtgtaaaaatcgatgataaattaaaaaaagaagctcaagatattcttgcttcatatggggttgacatatcaacaggaattagaatgtatttcaaagctattgttagaagtaatggcattcctttagaactaagacccatgacagaactagatgaagcgaactatgaagctgataatcacatttatcatggaagttatagctcttttgaagaatacaaaaaggccatgcggaaataatcatgcaagttaatcctaccaagcgctactaccgcgcttacaagagatatgaaagaaaacattatccaatggattatgttgatgattgtgttgaagcaatattaaccaatgacaaagaatttctagccaaacataaagatcaccctgtaggaaaaaatcgcaaaatgcacgttaatcgtcaatataatgacgattggctattgtactaccggattgataaagaaacacatgaactaatcctagttttggttgcattaggaacacatgatgaactagatcgatttgccaatatgtaatagcatgcgttgtattgaacaaaaacagattaatgcagagctcgaagttactacaatttgtagaagtttcgagctttattttgttccaatcacgctaatgatgttaataataatttttgcaactgtaacttagctgcatcttggttagcctgttctggttgctcatgattcaattgacaattctcaagataatcatcaatacccgctttgaaatctttcttcaactctgccagagaatttccttcataagaaataaaagtattttctagacctaagacttcgccaaataaagtatcattttcaacttcgataagtaccttggtaacctttataagttagtaggctcatagtcttatacctgccattcttaatccattcttcaacgttcttaattgatattgtttaagcatatttcgaggatgtggtttgtgtaattaaagattattcacctctcttatatattccatcactgtacaaaatttggaattcaaaatttaggcttgtctcccatcatttattacgcaaaaaatgtctaaattttttgaaaaaagttaatttttcaaatcaaaacaaaagaatcattacatgaactacatttttgatagcgaatacaatatttttcgcttcaaatacatagaatttctttcctttttaaaaaaattctttaaagaggctgtttccccttgtaaatacgcggattactgttaaaataagtaatcgtagtttatattaaaagaggtatttttcatggaaactatttctaagaaacaattagtagatcaaatcgctgcaaagactgatgctactaagacagacattaacactattttggacgcttacatcgacgttgttaagagcaatgttgctgaaggcaacaaggtacaattagttggcttcggtgccttcgaacttcgtcaccgtgctgctcgtaagggtcgtaacccacaaactggtaaggaaattgaaattgctgcatcaaacgttccagcattcaagccaggtaagagcttcaaggatgaagttaacaagtaataatttattattacaaaaaagaccgcgagttttctcgtggtcttttattttgcctcagaacctgccattaacaagacttttccctgctcagtttcgatcatctcgcaatctatgccaaagttttgcctaatcgtctgcgccgtaattacctcttctggcctgccctgcttttgaatcctgccttggttgagcaaaattacctgattactatattgcaaagcctgattcaaatcgtgcaaaatcatgcaaatcgtcaaattctgctttcgattcaattttttcactaaatccaaaaagcgatactgaaaatgcaaatccaagtatgttgttggttcatctagaaaaagatattccggctcttgcgccagtgctgtagcaagccacacacgctgctgctgaccgccagataattgcgctataaacttatctgccaaatcagcaatctctagctcctgcataatctgttgaaggcgagcagatccattttcttcatcccccatcaaggaatgatacggcagacgccccattttaaccagttccttgacagttatctgatcatacaattgattctgctggtggacaattgctacctttttggcaaaatccttcgcagctagctgccagatatcttgcccatctagcgtaattgtccccgcagacggccttattgcccgtgtaagcaagcgaaacaaggttgacttgccagatccattaggaccaattaaagtcgtaatctggtgctcctgcaggctcagagagaattgattaaataattgttttgacccatatgaaaaatcaatctgcgacgctttaagcatttttctgcctcttccataaaattaaaatcataactggaccaccaacaatagccaaaataatattagccgcaatctcattcggtgctgtaatcacccggccgatggtgtcaacgaacaataaaaaccaagctccagcaaaaatcgaaaatggaatgattttttgataatcatatcccaaaagcaaacgagcaacctgtggcacaataattccgataaaagctaaaacaccaatgcaagccgttgttgttgcggccaaaaccactgcaattagcatcaagactaaacgcagggttttagcagaaacacctaaagacgtcagctcttcatcattgaccttcaagtaattagcccaattcataaaacaaatcgcgaaaatcagccctactacgccaataatcaataaatacatcgtcgatccccaactacttgtggccaggctgctgccactattttgactattagtgaaaacttcctgcatccccgtgaacactgcattcaatgccactccgatgataattaactgataaggcgtcatctttttttggaataataaaagaagcccaaacgctagcagtccgccaataatcgcgaaaataattttaccaaagaaaatttctggcaaaataataaccgctagcaattgacataaactggctgcactagagatccccataattccaggttctgcaatcggattgcgcaaagttgcctgaaaaaaggcaccactaacagagaggctagctcctgctactagtgccgaaataatccgcgggacacggatattaaacaaaatattcaattggctgttagtcatcttttgcattgaaaaattgcttgctccgtgagttaatgcaaagaaaatcgtactgattaacaaaactgctaaaatcaagtttatccaaattacctttttcttcattttgatcactttccagggtacaaccagttgcttaatttattcaatgcttgagaaacattcatgttagctgaagcattaaagtctggttgctgtaggtcataaactctgcctgtctttacggctttcatcgtcttccaaacagaatttttcttaaactcttgcttaaattgtggcaaagttacatttggtaaagcatgttctaatcgcaaaatgacatctggatttttagtagctagcgagtcattacttggtgacaaataaatctgactatcagagtgatagatattttccccaccagctattctgaccaaatcacctaaatatgatcgattagttagaatcatgtaattagcgccaggcaagcccatcaagatcaatactctaggcttacgaccgtgaacacgtgctttagcctttttaacggcttttttgattaagccaatctgataatcagcctgtctctgccggtaatactgcttgcctaatgaactcagtgtagcttcaaggtcagctactgaatccagcttcaaatatgtaactttaacgccttgttctttaaatgattgatcatactgatcttttaaagttgagactgcatagacacgagtgggattcaaagaagcaatcttttcaacacttggcttcattggactcccaatcttgggcaccttttgatagcgtgctggtaacttagcctgcgtctttggaacccctgctaaattaacgttcaatttatcaaaaatttcagtaatcgctgcacttgtggcaacaatcttttcattattggcaactttttgatcaatcaatcgtttagcaccaattgccactccgacgattgctactaaaaatataattaaaccaataattaatcctttacgttttttcatttactttttctttccttggcatttacgacaatcaaaacagcaacgccaattaaaattaacgaactaagcactccagccaaaataacataataaaaatttcgctgcctttgttgattagcacgttgattgcgtgcattctgcgctatttgcctgttagctattgccgcttgcttcttttgtgccaattgctccttaggcttaacactcttgtttttcacctgtggcgcgctgcgttttatcgcactttccgcatgacttgctcgctcttttttatttgttaacttaggcaactgtgtagtgtcaaaagcaaaagtaatattgtgtgttgcttggtaaacatgtggcacatctattttaatttgactagaaatatcacgttttaaattattagtgcgaaaactatagcgataatcatagtcactgccatgccgcgtttttactacgtttagcggtgcttgtccatcaatcgttaacacctgaaccggatagggacttagatctttcttagtgcgaatcgtcatcgttaccaggtactgattgtcgtctaccacaacctgagcaggacgcgcatagtagccatcagccatcgaggtctgatgcgtgccatacttgtaagtgcgataactcacgctttgtgcactaacagtcacaccaaaaataaacaaacaagttagcaacaagaaaggaaaagagataattttagctatatttttcattatttctttctcttcaaaattttatttcttaagtaaaaggccaaaccaataattgcagcatcaaatgctaaaaagcctgcgatcacaggcaaaaatggatattccaccgctgcaatcgtcgccatctttttcttcttgggtgtcatctttgccccaggttttacactagagtttgaagaagactgctgctttttaactggctttgactgcggttgagcgctacttgtagcattttttgcatctttactactgtcgtcattagctgcagtaatagcatcactagtactacttgaatcagtgctactatttgcttcggttaatgccttgcttacagtcgaactgtgcgccacattttttacaccaaaagcaaaccagaccttaaacaaacgatcatgaatattggcaattggtacgctcaagcgcagactcccctgagcctgcttctttaactgatttagcgacttgaagtggacctgataagtccagatatccttgccagcttgtttggtaaaacgcaggtttgaaattgaaccaattcccagtgaaaccggctgaaatttggtcaccatcccatgctttacctcaacttttaaggtcataacatagccctgctttactttttcaatcctggcatgatgcgtgtaaaaattatttgctgcagaaacgccactgcgatccgccttatagaccgcataattgatattttgaacctttttatctgcgctgaccgtgtgtacttttcttactaacttttttgacgctctttttactagccttcttttgcttcttgtcggtctttttcttgctagtagttaaaccgctaaccttgtcatacttcacccaagcttgttcggtcatcttaccaccaaagtcaatagtgacttgcatcttgacccaaccattatttttgaaagcttttcctgcaaaaacaaagtcaaaactagatttgtcggcggaaacattttcctttttaccgctaacgccattaatcttgagggattttacaatcttatttacgttttgccccttgcccattggactatttttaccatcgacatggattgtcatcttagtcacatgcttttgactaactgttaattgcaccttatctcccacaaaaccttgagccattgacttagcatggctgcggtgatttttactgtatttgtaaaccgtcattcccactgtcttttgactttgttcagcggccattacaaccggattagtttgcataaatgccactccaggtgccattaaagtcattgcgaccgaactacttgcgattaacttaagtaactttttattcattctaatatccttctttttactattaatactattagtcttttctattataaagttcttaaaataactatgcaatcggtttcaagatgatattttagagactgtaaaatagtttgtgtaaggatgaatgattccttaaatttatttctttaaacattagaaaaaggagttcctttctcgtatgattggtttgaacaaaaaaacacatacagaaagaagaactccttcatgaatgattttaccaaagattttgctcaagctctattcaatccagacaaaataaatgatttattgcgcaaagagctacaacaggctgttaataacttgttagaagctgaattgactgcctttctgggctatgatccctatgccagaaatggctggaatactggcaactctagaaatggtgcttatttccgcaaagttgatacgcaatttggcccaattgaagtgcaagtgcctcgggatcgcaacggtcaatttcatcagcacacgctgcctggctacaagcagcactcggatatcttggaaagcatgattatcaagctttactccaagggcgtgaccaccagggaaatagccgatctaattgaaaagatgtatggcagccattacagtccagctcaggtatcaaatatttccaagcagatgattccaaaggttgaggcttaccacaaacgcaagctaagcgacaagtttttctgcgtctatttggatgcgacataccttcctttgcgccgagaaacatttgagcgtgaagcagtctatattgccattggcatcaagcctaatgggcacaaggaggtcattgactactgcattgcacctagcgagaacattgaagtctggacagatatgcttcaaaacatgaaatcccgaggcttaaagcaagttgagctttttctttctgatggtgttgttggcatgaaaacagccttggccaggacttatcctaaagctcattttcaacgctgtttggttcatgtcatgcgcaatatctgcgctaaagtacgcgtcgacgatcgtgaaaagatcatgaacgaattcaaacaggtgcatcaacagacaaacaaagaagaagccacagctgtcctgcatgacttctataccaaatggggcaaggtttacagccatgttatcagaagcttgaaagacatagaaccagatctgctggtcttttataactatcccaagcagatcagagcttcaatttattcgactaacatgattgaatcatttaacaatgtgatcaagcgcaaagctaagcctaaggcagagtttccaactgaacagtcgcttgatgcttttattggcattcaggcaatgagctacaatgaccgttatttcaatcgaattcataaaggctttggtcaggttcaggacaccttagaatcctactttgattaaataaataattaaaaaatcaatttacgagaaagatctatttacacaaaagatttgacagtttcatattttattcagtttattatgctcataaaaaaataaaataacaaaaaatatattgatttataacatttatttgattataatgtaagcgatatctaaaattcgtaggaggaaacttttatgagaaaaaatactaaaatcattttaacatcacttgctttactcgcaagcgctagtgttttggcaccatcagctgtagtgtctgcagctgatcaacctgctactaatgttgctgcaactactgctactagtcaaaacagcgacttgcaaactatcactatgactattaccaaaactggcagcactaccccatcagaagctgctatgttcttgggcaactctgctcaagttaatgttaaagacggtaaagttaccgaagtaattattcacgttgatggctctaaagcaccaatgaccaaaggtcaagacatgtctaagatggttgctagcctaacattgaatggtgtagccggcaagcaagaaaatgttgctaaagacggctcatcccttgactatgttttctcagcagatgcttataaagaaggcgctggcagcttagaattcggtcttaacgttatgggcaagaccatgaacgaaaaggctgatattactttaggtaaggtcgctgaagacactgctaataaagatgccaatactacatctgacaagactcaaactgatgccgctgctgctaaaaagacagctgccaagaaagctaaggccgttaagcggactctgaagcacaatgcttatgtctacaagaagaacggcaagcgtgctaataagaaagttttgaagaaaggtcaccgcgttaacacttatggtcgcgcaattaaattacacggcaagactttctatcgtatttctaagaacacttacgttaaaaaagctaacttttaactaaaaatttatttcaagaaaataaaaagacgggcattggctcgtcttttttgtttggattgttatttgagagaaaatttctatttaagcaaaaatatccttaaaatcagctaccacgtctttattctttctgccaggaataacagcgtaaatcacagtggagatgcttgtcggagtatcaaaggcctcctgccacatttttgcgacttcttttgcgttaaagccaaaaacgcctgcaccccagcctttgaccacttgatttatcttagtaaagactaatgatagaggttgagcaactgctttatggcgactcaacaattctctaatcttgtcataaagcttggctttacggtcgtctcccggctttgcttgccagttttcgcccgttttccagaaggtaaagcctaggaaattgctcttcgttggtctaactactttagttttagtagtgttaacttttaagaacagttttctttctagccatgatgtaattgacttcatcacgcgcttagccgacttaccactcttgacgaagatattgcagtcatcgacatagcgaacaaagcgcaagcctctttgttccaattccttgtccattttatctaaatagatattggataggattggcgagagcggtccaccttgcggtacgccaagctttcattggactagatgaatgtcatgcccgacacacttcaaaaagccacgctgttgagcgtggctttatatattttttctattttccactcaaattaagagctatttgagaaatcaaagtatccatgaaatacataccgaaaaagacaaataatgccacaattaagatcttccatgaaatctttgataaatccttcaatctatgagttactgaaattccggcaaaggctaataccgatgtagttaatgataaaaaatctactgcattaattacacgaacacaatatggactaagcaaacagaaaactaatgaaacgatagacacccagcctagaatgggaaatcctctaacaatcttccacggaactcgtttcattaacatactgataataatgccaatcagagaaaacagccataatagacctaggccggcaaaagtatcaggtgtaattggggtgctcttaggattttttactaacttaatctactgaacaaataaaactaaactaacactaagcaataaaattaatgcatctctacctaatttataaaaattattttctctaatcatgttctgggtatacttctttctttttatcaagcaaactagtcaagtgaacatacatgaatctttgcaaaggaactgcgaggaaatacataatataagttccaataaaactagttaacaactgacttgctgccgcaaatgatagaatcgtctcactatgtttaggaaccagagctgctaaagctgaagaagctgcagtcatcatagaacttgatcctactccagaactcatcgcaacagcttgataactaaagcccatccccaaaagaactggtgctaaaattgagaagacaatcgaaccaaaaattgttccaattaagtaaatacctaggactcctcgacctttcggtgaatcaagtgtatatttttcactaatataggctagttctccttctctgcctaatcccaatgttgagccaatggcctcttgtcttaatcctagtaataaagctactggtagtccaaataaaattgtacctaaattacctaactcatgaatgagaaatacccaacctactgataaaatttcattaatcttaggtgcaacatttgctccataacgtgccattagtggcaacattattaaaatcatatattttccagcaaactttactcttttatcattgtagagttgcttaatcggctttaatggaagtaaataaataataatcgctaaaataactgcgaatactaatggtagaattgaaacttcaattttaccaattttgaaaacctgcatccctataaattccgcaatagtgtcaatcaatagcactaaaataattaatggaccataattttttaaagatttcatttttctgctcccattttatttaattgttcaagatattcctgatttgttctacgataagtcctgattttattaagattatttgatatttctaaaacactgttaaagataaattccgggaatatgtccagtacaaaaactggatcaactaatttaaaatcagagccatgaatggttccattccaaccaccatatccaatctgaatagttggcattagataacttacatcaccaatatcaccagctgccatggtatagcctcggttttcaatcaattctgaaatcttgtcattccttaaaaatacattttttactaaagcattcatgtctctattcgaccttaaagtcaaatagccaacctgtgtttctgacttaaaattaccgcctaaagctagggagcatccttctgctgcttgattgaattgcttcattagttgctgtgcatattcgacatcaaagtatcgtatatctgtccccatgctaacatgatcgggaattacattaatcgattctgtattatcacctatcatcactggattaaacctaatttgatttggattttttaattgttgacgtttgaaggccaaagcagtggtaaatagggtggctatactctgtgcatttaccccctcttcaggagcaaatgctgcatgactcgccttaccaaagaagtcaaagtattgaaaattaaatccagctaaatcacaattaatttcaatagtcctacgctcaaaatcttcacctatagcatgaactgatacacaataatcaatatcgtcaaatacgccaagtttgatggcttcctgcttacctccaaagtaagtaaaatcaccagctaacttatgctttttgcgccaattaagatctacaaattcttcggctggagtaaaaataaaagccaaattagtgccaaactcgttgagacgatcatttttcatcagttcatttatcaaagccaaggctgttgtcacctgagtatagtgaccacaagcttgcgccgctcctgtttcagggtcagcatccttatgacctggctgataaagtgaatccaattctgcaataatcccaatagtttttgggcaatgattatcaaacattaccttaagtcctgttttacaataatgttcgatttttatattagtagaaatcttagcaatttctgcttccactgccttagaagttttatactccttatagcctaattctggattgtgtagtaaataccctgctagttcctgtaattctgagtagtattcttgaaaacttgacatttcaatctccacttattcaaatcatcagtaatacgtttgatggcttaaatactacatcgtaattcatactaaatcaagaactatttttatattttgggttatgtttattcgcttttactggagaatttagtaaaatgtttactttaatttgaactacacaaacaagcatccccgcaagaaaaatctcacgaggatgctttatttgtgataaaaaatatttagaatttacgtaaaccatgttggtaaacttgtttatctttttgaccaactgcagcaacattttctaatggattctctcgtaaaactaagaaatccgcatattttcccacttcaagtgaaccatattcttgatcaaccttaagcaattcagcactacccaagccgcctgctcttaaagcttgataatttgtggctcctgctctaactaattccaccaactcatttggtgtatcagaaaagcgattgaagtatgttcctgcatcggtacccattgccaatttcaccccttccttaattgcatgtccaacatgattataaaagtcatcaactactgcacacatcttgcggtatgagaactcaggtacaacatcttttccatgaacgacgattgtccgacctgcagtcaatgttggtgacaaaaatgtaccttgttttttcatcaaagccaagtcattatcatctaaataaaaaccatgttctaccgaatcaactcctgcaacaaccgcataatgaataccgcgtctcccctcagcatgggcacaaaccgtcatatgcttagaatgagcttcttctactgccatcttcatttcttcaagagaaagttcagtatcatcaacttcatcacctaatgacataattccaccagttgccatcagcttaacatttttagcacccttggcaaactgttcacgcactgcccgacgcatgtcctctggaccgttaaccaaatgactagcattttgctctccatttaaccccaccttgaaatcaccatgtccgccgacaattgacattgccattccagttggcatcacttgaggaccttcaaaaggatactgcttgcgcatctgcactaatttacagtcaacatcaaaggatgtgccacaactacgaacataagtcacaccagtttgtaaagcttcacgcagatcccgcagtgctgcataagtagtcgaagcttcagtagtcggaaattttttcttcaagtcagaatcaagccccatgtgagtatgtgaattaatcaaaccgctcatcacatatttccctttaaggtcaacttgtttgtcaaaatctgctgtgcattttcccttaccttgatcggtcaatttacctgtttcatcatcaacgacaaaccaagcattatctactagattatcttcattaccaacgaataaattacaatttacaaaagctgttttagtcattatttttctcctaattattacttacagatgcatccttaaagctgaaattaccacccaagaattctacatttttaacacttggtcgaaccatccaagcttgaccatcatggaataatggcgtcaatccttgttgatcagttaaaacacgttctgcattatacaaatcttctaatcgcttagtaggatttaattccttatctgaattattcatatacttgtcaaaatctttgttagaccatttaccgaagttataactttgtcctgtcatcattgtgtgcaattgtgaattaggatctaaatagcccgaagtcaatccagtaaagactgcctcgaaatcaccattgagcattttcttaactctagtagtcttcggcatgcttctaacagttacatcaacttttttgccaaaggtatcttctaactggctttgcacaaactctaaaacctttttagaaacgtcatcatcgtcacccattaaggtaaaggccaacttattcttacccaattcttttaatgctctatcataaagtttcttagcgcctgcagggttataattcatatacttattagctggatttttgctttcaacatactggtcaaaattcttaccatcaacatattcatttggtccagcaaaagttcgagctacggtattagcaccaccaactgttttagccaattgagctcggttaagtgccattgaaactgctcttctaaaatcgacattagctagttctggatgcttggatacattgaaagtcaagtattcagttctatctagtttatagactgtataaccagattgacccttcagtctctttgaagcctgaacatcaagataggcaccatctaatttgttagcctgatacagattgtaatcagttgaaggcgtcttttgtacactataattaaccgtctgcaatttaactttatctttgtcccaatattgatcattcttttctaacttccagttaagacttgaaccagtccagcctttttgaacaaacggaccattgtaaaccatatacttagatgcagttccatattttttgccaaacttttcgactacgtgtttattttgcggattccaaccaactgacaaggctttaaaatacggtacgggatgtttcaagtgaactaccaattcatatttacccttagcttcaacacctaaagtcgacggagcttttttcccagctaaaacatcatctgcattaactacatttgaccactcattttgctgttgtgattgtgtcttaggatcaagtgtccgtcttaaagaataaacaaaatcttcagcggtcactggatcaccattagaccacttagcattctttcttaaagtaaaagtccaggtcaaaccatctttactctgattagttttagtagccacaccagatacaactttacccgctttattcagtctattgagcccttcaaaaacattagatgcctgttcactaccagttgtatctaccatctttgaaggatccatagtttggatttctgaggtagtcatccaggtcaattcttgtttaggtgctttagcaccagatttgcttgatgaacatgcagataaagtacttacacctaaaagtgctactacagtcgtgccaaataagtgcttcaatgtttttctcatttttatctctcccataagtcaaaaaattaacaacaagcttatgataataaaaaaacgccctactagatcaattgatctaatagggcgtcttcaacgcggtaccacctatttattcgtagaataatactcacaaaaattctacctcatgcacgtgcggctgattctatcaaaatcagcgatacgtcgccgctatagagggcggaccctgaaaatgctaatatcgcactttcagctcaaaggtgattttcacttaattcatcattatcttcttccaccaaccgaagactctctgcaaatcatttcttaagttactttccttatcaaagctcatttttttatttattgtaaacaataatatcatgtatttttaatatgtcaattatttttttatttttttcaattgttaaaaataaaatgatcaattgcctcggcaactgcaccatgattattatcagcctgagtaatgtaatcgcattgctctttcatagcaggattgacattagctacaccaacacccacaccagcagcctgaatcattgacaggtcattaaaattatcaccaatggcaattgtttcttcaatcggcaccctaagttgctcagccagcttcatcagtcccgcgcctttattgacacctttacggttaaattccaaatagcgattagacgaatacgaaatatccaattcttgcgtaattggtcctaattcagcggcgatccggtgcaaataattattatcaagactctcatagagcaccttggcaattttctgcccctccaaaaatgacaagtctttatcttcaatctctttaaactggtgtcgtcccgtcatataggcacgttcatcatcatcgatatgatacgtatataccatatcttgagtgtaaacatgcatggcaatatctagttcaaccccatgccgatataaccgatccgcaatttcattaggcaagccgtcaaaatacagcacgcgattattcttattttctgtaatgctggcaccattgaatgaaatcacatattcattagctgcctgctctaatcctatttcctttaaagtattttggacagaaacgtagcctcgtccagttgcaggaacaaattttacaccgtgagcaactgctttttgaatcgcttctctattttctactgagacatgcgtatctgcgctcaacaacgtttcatctaagtcacacgcaataattttatacatctagtcacctcttcatgcttagtttaccggagacacgcaagcctagcaaggcaacaaatcttgtaaaataacataatccgcctaagtataagtgattacaaaatagtaaaaatatttttcattacatagttataatagacatgcaagcctttaaataacagcgttcttgcgccttgaagacggtaaaaaatcatgctaagttagtgtcaaaagaatggggttaataagatgacagataagatatacactaattactttatcaaagatgaagattttgacaaaaaccacttccactacaagaaattaagcatccctcaaggtgtagaagctcagccattagctgtccctccagttcttgcactggataaggaaactgatactgatgtctggttcactcttgaatcaattgaaagcgaaagccaaatattgcctggagctaagaccaagacttggggttataacgctcctttgttaggtaaaaccatggtcttaaaacgtggccagcgagttcacgttaccttaaaaaatagtttaccagaactaacaacttatcactggcatggcatggaagttcctggtcctattactgatggtggctgtcatgcccctgtttatccaggtgaagaaaagcaaatcgaattcactgttaatcaaccagctgccttaacatggcttcatgctcacccatgtccatccaccgctgcccaagtttggatgggattagctatgggcgtagtagtaacagatgaaaacgaagctaaactcccaattcctaaaaactatggcgttgacgagtttccagttattttgcaagaccgtactttccacaaagataatcaacttgactatcgcgctgattatgatgcaatgggcgtcttcggtgaaacaccattaatcaacggcacggttcgcccttatgttgatgtaacaacacaaaagattcgtttactattcttaggtgggtctaaccgtcgtgaatggcgcttgcactttgatgatgacctagttatgactcaaattgcaggtgacgattcatttttgcctcatccaatcaaaatgactaagatcttggtaacacctggtgaacggcttcaagttgtagttgacttcaaggattaccatgatggcgatgtcgttaacctttatactgatgatttcaaactaattgaatttagaattcacaagtttgcacctgacaacagtgttattcctgatacattattcaaaccagaaattcctgaaatcgctgaagatttgccgattcgtaaagtaactatggatgatcacaacaagataaacggcaagcaattcgcaatgcagcggatcgatatgaagcaacaagttagtcatgctgaatactgggacgtaactaataccaactctaaggaacacggtatgttgcacccattccatattcacggcacacactttacagtcgtttcacgtgatggcgaaaagccatttccaaatgaatatggttacaaagacaccattcctgtcagaccaggtgaaaccgtccgcttgcgtgtagaattcccacaaactggagtcttcatgtaccactgccacattattgaacacgaagatgccggaatgatggctcaaatcgaagtattcgaccctaaacacccaaagacatacaagttaatggatatgaagacattaaccgacgcctttgctaaagaaagaggcattaaacctgaagatgtgtggatgccaggaatggataccgaaggttgcggcatggaagttgacagcagttctggtgctagtcaaaaataaaggagcttcaaaatgtgctcaggaatgaataacttattttggaaaattatttgggtaattgtttacgccattactgcctactttacttttaccggcaaaatgatgatggcaatgtactggatggccggtgggatgttggctgaatcggttgtctcactcatttactactttgttaatcgacaaaaataaactttttctcactatttcttccgttactaactttttaactaagtaaaaaaatttatttgacaaaattaaaacgagatgataaattaatagcaataattaaaaaatcttgatgaatagagtaattatagctagctttcttacagagaattactggttggtgagaagtaaaagaaactacttaatgaagatggattcagaatgattatactagtgatatttagctagtatcggggttgctctcgttaacaatgcaagctattgttagatagctattgaggtcagttatgtaaatagctggcaaataaaggtggtaacacgaagcactcgtcctttgaggatgggtgctttttttgcatatgagagaaagaaaaatgagaaaaagaagacagcggaatattattattggcaccattgttagcttattgattatcgtagctggttacttcagcttcttttggacgccaaaaagcaacggtcaaaccaaagttagcgtaggaatcgttggtgccagcaaaggtgacattgcaatctggaaaagcgttgctcaaaccgtcaaacagaaatatgggattattttaaccactaaaagttttgatggttatgaccaacctgacaaggcacttaaatccggtgacgttgatctgaatgccttccagcactatgctttcctcaacgcctggaacaaagccaaccatggcggaattactgcaatcggtaaaacctatatctcacctattcgcttatattccaaaaaatatcatagcctaaatgcactacctgaaggagcaacaattgtggtccccagcgatcccaccaatgaatcgagagcactttttgttttgaaaaatgccgggttgatcaaattgaagaaaggcaaagtattggtctctgttgcagatattactgccaatcctaaccacttcaaaattaaagaagttgcatctgaacaaactagccgcgtgatcgatgatgttgatgccgctgtcgtcaacaatgactttgctggccctgcacatctaggtgacaagcaaactatctttgtcgaaccattgaacaaagactctgagcaatggatcaatattatttgcgcccgcactaaggataaaaataaaaagatttatcaagaaattgttaaagcataccagaccaaaaagaccaagcaaatttacaagaaatactacggcaacaagcaaattgccgcttgggatgtaaaactaaaataagcaataaataagacgagaactacaatgactgtaattctcgccttatttttttataatgactattttttatttcttcaattgcttcaagtgttctttgatcttatctgcagcagcttgcaacttttctttttcttcagaagtaagctttaattcaatttcttcctcaatgccgtcgcgaccaataatagctggataaccaatataagtcttgtattcaggattataaactgaaacaggacaatatagatgagcatcgctaaagactgcttgaactaaacgagtagcacaagtggcaatagcatagctagtatagccctttcccttagccacaataaaggaattcttatttgattgttcactaatcttttcttgttcttcatcaccaaacaattggaaagcaatcttgttgttaactcttaccgttgaccaggctgtaaattgtgaagaaccatgttcacctaaaacgaaaccttctacgttacgtggatcttgaccaagtttttcaccaattattctttgaactcttgcagtatcaaggaaagtaccagtaccaaagacgcgattcttctttaaaccagaagtttcttgcaaaatttgggtaattgcatcacatggattagaaatattgatcaaaacgccgtgaaagcctgattctttaatatctgccccaacttctttggcatttcttgcatttaattcaaactcaccaaagcggtcgcctgtcttaactgaagccgcaatatcaccaaaagcggtaataataatgtcagcatcttctaagccgtcccaatcttgctttcgcacattaacatagctatcatttctagccaaagtatcatgcaagtcattgtattcagcatttactttagcttcatttttatcaattaaaatcagttcgtcaaccatactgtgcgtaaataaagtataggcaacggttgcaccaacatggcccatgccaataataccaactgttctcattttaaaatcctttcaaaaaaacaaaaaggaagatagtcatagctaccctccctttttattattaggctttaacttcgttaattacaacgtcaaacttgccaccaggagtggtaattgatacggtttcacccttctttttgcccaataaagcttgagcaattggtgaatcgttagaaatcttgccattcaatggatctgattcatcactacctacaatagtgtaagtttctggatcatcagtaccaacttcagtataggtaattgttttaccaactgaaactacgttaggatcaacgctttctgcatcaacaacttgtgcatacttaagcatttcttcaacttgagcaattctatcctcaaggtgactttgttcatccttagctgcatcgtattcggagttttctgacaagtcaccgaaagaacgtgcaaccttgatacgttcaataacttctggacgcttaactaattttaagttctttaattctgcttgaagtttttctttaccttcagcagtcattggataagatttttcaggcatatttttaactcctcagaaattaattttctttatcttgcactgatcaataatattaatttacgtcaataatgtcaacctttaacgaactttaatcgcaagatcattttcaagagcagcaacaatcttgtccatcgcgttattgacaacatcgtcggttaaagtatcttttctgttcaagaaggttaagttgtaagcaatactcttcttaccaacatcaatgtgagcaccagcataaacatcgattaccttaagttcagttaagtacttaccagcattagatttaatgacgttttcaatttcttggttagtaactggcttatcaactaaaagtgaaaggtcacgttgaattgctgggaacttaggtgcaggcactgcagttacgcccttagttaacattggaataattgtatcgagatcaatttcgtagccataaagctcgctaccacgaagtgccttatcagcaatcgttacagcgtgagcaatcattccgatcatcccaacatattgcttatcaatgtagattcctgcagttctagttgggtgcatccccttaatgcctttagcctcataaaccactttttcaggatcaataccaattgcattgaacaaattggttaactgtcccttaacaaagtagaagtctaccttttgggttaaatgttgccaattttccgcaaaagtattgccagagtaaatagctgctaaatgttcatgctcgttgaatttaccaccatcatggtcataagttctgccttgttcaaataaagctaattgtgtttgctttctagcaaagttgtaactagcagcatctaccaatccagtcatcaaattctcacgcattgcagaacggcttgagttaagtggtgatttaacttcaactaattcttttggatccttagtgtaacgaacggccttttcaggtgaagtcaaggagtaagaaatagcttccatcaagccttgtccttcaacaattgccttcatgcggcgcatcatttcttctttttctgagtagccaccatgagtttctggcaaaacaggttgagtagattcaaggttgtcatagccataaagccggcctacttcttcaactaagtcggctgggattgaaatatcccatcttctatttggtacatggacagctaaattatcaccatcaacatctaccttaaagcaaagacggtcaaaaatctttacaatttcatcaactgataacttagtgcccaatactttattgaggtatgaagcagtagttttaaccacaactggttcacgcttttggtcagttgccttaagaataccttcatcaacagtagcgtcagcgtcatttctaagtaaaagcgctgccatgttaattgccttttcagtggcatcccagttaacgcctttttcatagcgacttgaagcttcggtccggttagcgtgacgaagtgctgcctttctgactaaagttggatcaaagatggctgattcaagaatgacatctgtagtttctgaagtgatttctgaatcaagtccacccatgacaccagccatcattactggctttttaccatcggtaatgatgatatctttagggtcaaggtcaacttctttttcattaagcaaagtaagcttctcacccttattagcaagtcttacttcaaactttccgttagcaaaagtcttagcgtcataagcatgcattggttgaccagttaacagcatgatatagttagtaacgtcaactacattgttaattggacgaatgcctgcattccaaagacgacgctgcaaccaaagtggtgagtcttgaatcttaatattctcgagcttacgtaagtaaaacttaggtgtaagcttttcatcaactttaacatcgagtgaatctgtccaggctggaccatcttcttttaagacaaccttttcttcaacctttggcttttggtcgataatagcaccgacttcataagcggcaccttccatgcctaaagtatcagcacggttaggagtaatgtcgaagttcaaaatgtaatcatccatgccaagtgcttcatatacatcttgaccaggtttaacttcggcatctgctgggaatacgtaaataccatcgacaaattcttgtggtaccacgctatcgctaaagccgatttcttgtaaaccacagatcatgccgtaactttccatgccacggattttgcccttcttaatcttttcattgccagcaatacgagcgccatgaagagcaacaatcacatcttcacctgcagctacattaggtgcaccacagacaatttgcaaaggttcgttttcaccaacatcaacgtgagttaagtgcaagtgagtaccttcaacgccttcacaatcaaggacacggccgacaactaacttcttcaagccatccattggatgaatacggtcaggaatttcaaccccgctacgagtaatttcttctgctaattcgtatggattttgaccatctaaatcaagaaaatattttagccaattgtatgaaactaacattaattatctttcctccttacggaattgttctaagaaacgtacgtcattggtgtagaagtcacgaatatcatcgataccgtatttcaaaatagcgaaacgatcaagaccaacaccgaaggcaaaaccgccgtaaacgcttgagtcaacacctgcattttccaaaacattagggtgaaccataccagcacctaatacttcaatccagccagtgtacttacaaatagggcagcctttaccattacagttaaagcaagatacatccatttcaactgatggttcagtgaatgggaagtaacttggacgaagacgggtttcgcgatcttggccaaaaacgtgcttggcaattaattccaaagtaccctttaaatcactcatagttacgttcttgtcaataaccaaaccttccatttgcatgaattggtgtgagtgagtcgcatcatcgtcatcacggcggtataccttacctggtcccaccatcttaagtggaccctttgagaagtcgtgcttttctaggactctagcttgatcacctgaggtctgacttctaagcaaatcttcatcatcaatgtagaaagtagcttgcatgtcacgagctgggtgatccttagggatattcatcatttcaaagcagtagtgatcagtttcaatttctggaccttgaactacttgatagcccataccaataaagtagctttcaagatcatctaaaataatgttgattgggtgctttgaaccaagatgtgcttcacgacctggcaaagtaacatcaatcttttcatcttcaagcttcttaactaacattgcatgaacaatgttttctttagcttcatctaattgagcattaaacaagtcacgtaattcgttaaccttttgaccaacttcacgtctattttctggcgcaacttcacgcattgagtgcaaaatcttagttaattcgcccttacgaccaacaagttcaactctgacatcattcaaagttttttcgtctttagccttgttgatttgcttaagcccttcttcatggagctcttttaacttatcaaataagtccattaaatctttcctttcaaaacaaaaaagccccgtccccaatagggacgaagcatcgcggtaccaccctagtttggacgtagcaacgcccacacttaagttttcgttaacggtgaaataccggaattgattagatcctactcccaagatgaaattcacagcgttctttctatcttctcttgcagcttttgaaagaagactctctgttcagaaaaaatatctgctactagtcttgatctcagtaattaattaatatgatatttcttttacctgtttcttgcaagctttttgtaaagatactgtttatatctcatattttttgaattttaggaagataaatatttcataaaaaataatttgttttttatttataaagatctctcacaaatagatataaagaagactgcacttatttttaaatttataaaacaacacaacattctagtagctattccatctcataatcttcttttctttagcttatgttccacctataagatcagaatttacggttacataagtaatctgtatatggattatgatttcgttttaattggctagcttatctaattgctgtaaaccactaatcagagttattaatacagataaaactaagcatacaatagctacgaaaaagattaaggaaggagatattcttactagtataccacttagcgttgccattaatggacctgtaattcttgtcagagacgttgaagtagcagttaccatgcctttatattggtcaggtgtcttagattgaataatggtaaagaaattagcttgagcccatacactaccaaatgatactattgcatatcccatggtaaatattaataaagatttaatggccagcataatagtgaatcctacagtaataattaatccaataactattaattgagtgcctagctttatttttttactaaagtgtagataaacaaagttacccagtatactagcaactgatgagatagtaaaaaatatactaatttcatttattgaagcacgtgtttgtacttttaataagaaagttaacatcggtattactacttgaaagccaacattggcagcaagaaaactaataattaaccatttgatatcatgttctttcaaaacaaattttaaaccttgtgataaggtttgctgtatactcttcttttttttatcattgttctcgttatttgtagtctcaatacctttaacaacataagtcaaatagccaaaactgatcgaatctagcatgaagccaccgagatagttaaagaggttaacaataatagctgctatacctggtccaaatgttttttgaattgaactaatcaggccaactgctccagaaatctttgataactcactttcagaaacagactccgaaattagaatctggtatccagtccaagacattaagtcaactgttccaattaaaaagatcatgaataaaaccaaagctattggaaaatcatgcaatattaataacggaatgatcaaaggcttcaagagtcgcggccttgaacaggtagagctcttcttgtctgacggagtagttggcatgaaagaggctatctgccagtcctatcctaaagcgcattttcaacgctgcttggtacacgtcatgcgtaatatcagtgccaaaatgcgggttgacgatcgaaaaaagcactggatgaattcaagcagattcatactcagtcaaacaaagaaatggctgtacaggtgctgcatgaattctatcaaaactgggaaaaagcctacaaaaacgtagttagagatcttagacaggttgagcctgatctgttaaccttttacaactatccgccagctattagagcttcaatttactcaactaacatgattgaatcctttaacaacaggcttaagcggaaaaccaagcctaaaacagaatttccaactgagcagtcgcttgacacctttattggagttcaggcaatggattacaatgaccgttactttaacaggattcataaaggatttgggcaagttcgagacaccctagaatcctattttgattaaaagataaataaaaaagtcaatcaacgagagagattatttacacaaacttcttgacagtctcctaatttccttaccaaagtatggcttcaattctttattataatcgtaagtaaaaaagctttcgcgattcaatttggtaatttcacgatccatccatttttgtaaggacttattgcccttctttaccgcaccagaaatatactggttaggtccaatcgtcttaatgccgacagtaaacttaggatttcgcttaacccaagcatacagataagaattatcatcggcccaagctgcaccacggccatttttaatcgcgttaaactgctgagttttagagtcaaacttaagcaagtttacgcctttttgtttagtaaaatagttctctgctgtcgtccctttagtaacgatcacgctttttcccttcaattgttttggactagttatcggagctgacttaggggaaatcaccccaaccgatactttcatataaggcttagtccaactagccacgcttttacgctctggtgtcaaagtgaagttagccaaaacaatatcagccttattagaattcaaggtatcaattcaattattggcattaacttgaataaacttaggttttacgcccaaatctttcgccactctgcgagctaggcgcacgtcatagccaacacgcttaccttgtgaattaacccagccataaggcggtagatcgccaaagacagccactcttaaatagccacgacgtttaattgaagatacattattttcattattccatctgtcgcctgaagcagtgccgttaattcctggtcgcgtaattccaaaataaccagcaattaccacaactaccgcaaagaggacagccatgatccaattaaaaatcttttttgccatcattcacacctaaaaatccatactctctaaaaattcttgtgcccgcttagtctgaggtttagtaaagaattctttgcctggtgtttcttccaaaatttttccgtcttctaaaaatagcaccttatcggcaattctcgcagcgaagttcatctcatgcgtaacaatgatcatcgtcatatgttcgttatcagataatctttgcatgatatctagcacgccgcgaaccatttcagggtcaagcgaagcagtaatctcatcaaagagcattacttcgggatgcataatcaaagcacgcacaatcgcaattctttgcttttgtccagctgataattcacgcggatatacttttgcataattagctaaaccgacttgctctaataacttaactgcttcttgtttaacttcagcttcatcacgtttttgaacttttaccggtgccaataaaatattttccatcacggataagttgggaaataagtcataactttgaaagaccatcccaatcttttggcgcaacaattgccattccttcggactaggatttatttttttaccgtgaaaataaattgcgccaccctcatattcttcaagcccattcaccgttctcagcaaagtactttttcctgaaccagaaggtcccaataaggtcaatacctcgcctttatttaagctaaagttgatatcaaacaaagtttgatgcttgccataaaatttatttaaatgctctactcttaaaacttcttctgtcatttcattcacctaattcttagcagttaatcgttttgcccatgcagacaagggataatccaaaataaaatacaagataaagataaagccatatacccaaaacacaccagctggatattgttgattatttgcttcaatgatttgttgaccgacattgattacttccatgatattgataatcattaataaagaagtggtcttaattactctagtagccaagttgattgttgctggtagttctaacttaactgcttgaggcaacaagacataacggaacagttgcaggcgatttagacccagtgctaggccagattcacgctgcgttttgggtactgattccaatgcaccacgaacaatatcgctaaactcagcagctacccacattgagaaagctaataccgccatccaagtagctggccaattgacgtgcaagcttcttggcaaaatataataaaccaaatacagtaaaactacggttggcacaattctgaagaattctaagtacaaccgcaaaacaaaacgcaatggacgattttttaaggttctcaaaataccaaaaattgttcctacagccaagccaattactagtgacaaagctgcaatccaaatcgaggtccatagccctgccatcaaacgggcaaagttacttccttcaaacaaaacattaatccccgaatgaagcataccgtactctcctctcaagccaagttaataataaaataattggaatcaaaataatcgcataagcaattaccagcatcaataaatattcatttgaatggtaatacatcccaatcaagtcaagggctgtattagttaactccggaattgcaattactgaaaaaatcgaagtttccttaattaaaaaaataatattggcggttaaagccggcatgcttaggctaaatccttgtggaaaaaccacatagcgagctaattgtaagttgttcattcctaatgctttaccgctattaatctgactagggcttacgccattaaaaccaccggtaaagccttcagccatatatgctccacctaaaaagattaagccaatgatgctgcagacctcagcggacatttttaagccaattactggaaaggcataatataaaaagaaaagttgaattaaaagcggtgtatttctagctaattcaacatatactgtcaaaatttggcttaatacaggcaccttaaagtattgcaccagactgacaataatccccacaataattgagcccacaatgccaactagtgaaagccataacgttagctcaaatccccgagcaaacacaggcaaggcttgttggataattgtccaattcattaaaaatcccccaatcacacaaaaaagagacccactctcataggtctctttaaacaataaaaaaagatctacgctacttcagttgacgtaaatctccttattttctaattaaagctatttaggcatacgcaaactgaattcttgagtattaaaagcaatgttagatacacaagaacaacagtcagtattaacatttcttatacttaaaaattccattttcgtactcctttcatcttgtcttattttaaataagcaacttacattaagtaatatactttttttcttacttaatgtcaataccctaagcccatttgtcagcccaattatgtacttggtcaaaaactggcttaagttcagcaccttttttagttaaaccatatgaaatgatgccggtattttgatcaacactacgcttgacgatatcttctttttctagttccttcaaacgttcaacgagtactcgatcactacatgcctcaatcgttcgtgctaaatctttaaaacgcatatcttgggtatcacaaagtgaactaataattaaaccattccactttttgccaataatcttaaaagcaccaacaaagtgacagcacaattcataatcttctggtttacaaggagctgcatcctttttttctttaacttcttgcatcgtaagtccctccataattatataatccctgtaaaaataatattatataaaatacgcgtggtgctagttaaatcgttttagttaataaaaaagtccaatcttgttagactcaacttgtataataatagaaaagagcctgatctgattgaactgccttaagcttaagcgttttagccaccatttacaagttagttttaaagatttagtgataatttgtcggcactggtatcgtttgtatgcaccggctgagtttactcatcggcgaaatattgatcaaattaaaactacggacagtctgattttggctttacttatctggcaagctaagacaggaattgaatcacaaagaagattctgtgaatgtttcaattgtttatcacactcacgttttaatcgacgttcacgtcagctattgcaattgatttatcagatacggcaagaaatgaataaaaaggttgacctgaatggacatttcttgatcattgacagctttccggtacctgtttgccaaccaattcgcaactatcgtgctaaaatttttcgcggttatgccaacattggttataaggccaccaagaaaatttacttctatggtttcaaagttcatgccattgttagcgatgacggttacattcttgattatgtcgtaacaaaagcatcagttcatgatgccaaggagacagttgaactgctggaaaatgcccatccatctaattactatcttcttggcgacgaaggctatttaggcaaagaactgcatcaacagctaaaacaaatgggttatgaactttggacaccatatcgtaaaaatatgacaggagctaaaaagcacaatgatcatcaattgatggctattcgcagaacaattgaaagcgacttttcgcttctgacctattacaatgccgagaacaatcgagcacgtagtctgataggctttcaaagccggttggaaattgcaattttagcttataatttggcttattgtctagaaagatttaactagcaccacgcgttatataaaatatttttcagtattactaacattattatagtaaatccgcttactaattacaagtgctaagcgaagcgataaatcataatcccggctgcgacagcggcattgagtgattcagcttgtcctttaattggaatatagagcttttcatcagccaaagaagcaatggttttgcttatgccatgcgcctcgttcccaataattaaggcaagttgtggcactttttcgaaatcaggcaattgcttagcagaacgatcaagcagcgatgcataaaccggaatagctgcatcctgaaaatcggtgatcacattagctagatcacgcttaatcaaatcgatatggaattgacttccttgcatggcacgttgcgttttaggattatacaggtcagcactctctggtgaaagaactaccccatcaaaaccagcagcatcagcagttctgataatcgtccccacattaccaggatcagccaagttatcaagcagcacccacttgccataattaaacggaaattcttttggttgatcaatttttaataccataaaaatttcttgagaattcttagtcgaacttaagtggcgagcaatcgctttgttaattaatacgacattcttcccacttaaatcaacttcatattcactatctgcttgatcaagtgcttcttcagtacctaagatatactgatattttttaccagctttaagtgcttcttcaaataagtgaaagccttcaattaaatataagccttcatcatcgcggtatttcttttgctttaacttcgctaatttcttaatcgttgcattattaactgaactaatttgttgcatatttttctcctttttgtattcaaaatctattataactgataatctattttgatcatgctaaaatcaaagttgaacttaatttaaataagggagataaaaatggaaacaagaaaattaatttgttcaggcttagttcaaggcgttggctttcgttggtcaaccatggcattagctaacaagatgggtattcctggcactgttaaaaataatgcagatggtaccgttacaatctatttacaagcagacagtgataaaatcgaccgctttattgaaaaactacctactgcatctggatttgcccaaattcaaaatattagtcaagaatcggttccaggtgtagaaaaaatgcatgattttcatgtattatattagagacatacatttttagatagaaattaagtggtgatttatttaaatgaaaaaaattaaaagatacgctggagtactggctttattagcagtagctactcttgtattaagtgcctgtggggcaacaactgatccacatgttgcaccgcacagcggtatttacggttgggtttaccaatggttaggccgacctttacaaaatatcatgattcaaaccgcgcacatgattggcggcgataatggtgctggttggggaatcgtgattattacggtagttgtacgtgtaatcttgatgccattgatgttagtacagcaaaacaagagtgtacgtcaacaggaaaaaatggctcgtctgcaaccgcaaatgaagttgattcaaaatgcaatgagacacaaggggatcacccctgaccaacaaatgactttatcaacttggcaaagagagctttactctaaaaaccaagtttcattaactggtggaatgggctgcttgccattaattattcagttaccaattatgtggggaatttatcaagcggtattctattcacctcaattggcacaatccaaattctttggtatttctctaagttccaaatctgttgttttagccattattgcgactgtctttaccgttattcaaggttatatctcactaattggtattccagaagaacaaaagaagaccatgcaatcaatgatgattgttaacccaattatgactttgttcttcagtttatccttctctggtgccttagctctttactgggctgctggtaacttagtaatgattgtccaacaagtaatcgttacctttgtccttacacctagtgttaagaagcatattgccgatgaattaaaagataagccaattgaaactgttgttactaaagaaaaagtggatgctttgtttaactccaatagcggtcaaagcaaggctacaactgaagctaagaaagaactacaccaagacttacgtaaccgtaataaaggtaagcaaaagcgtaaatagttatcagtcaggaggaaaatcctgacttttttattaggaggaaaatatgcatactcaagaaatattacaacttttagatgatcatgatattaactatcaagtattctctcatccagcagtttttacaactaaaaaggcagataaatacttagaagatgaagattttgctaaatgtaaaactctttttattaaaacccgtaacgccaaaaattattatctactaatgttacccgaagataaaaaaatcgattggcaaaaagctaaagctgaattactctcctctagtttaaccttcgctactgaagctgaactagaagaaaaactgcaagttaaaacaggggctgtttccccatttagcctgctcaatgatcaaagtaataaaattcccctgattgtcgatcaagcagcaatggaagaaaacaatttagttggtgtgcatcccaatgataataccaaaacaattagtcttacttggatcgatttagctagaattttaagttcctatggtcatttgtttgaagaaagatcattataaaaaacttcaacttaatcctttttctccataaaaactttattcaaaaaatctttttcaattggatacttcgtcaaataatcttgaacaatcttgttgattctttcctcagctaattcacatggttcttgatttgccagctggtgcaaattattcagtactaatttatacagaaattgccgtttttccttgataatcaacagcgagaagttatgggcagctcgtctttgaaaatatctaatttcatttagccattcttcaaattgacggagagttatcttttctttaaacacacgtgttaaaacaatctttttggctttgatgggcattaaaaagaaataattcgttgcaacaccaaatgacatttctttaataatcagtccgatccctgcttcaccatgagcctcagtatatccctcatatggctcaagatagttttgcttaatatgccgcatgcgcgctttcacatcaccgcggtgaattactcgcccatcttttaattgatatttttcatttagaaactgcctttgatgaattgttcgtggattaagatttctggtgaaatttttaccattctcaataagagctgtttctgcaagggctactttgaagctttgttcaaacaattgcagactgatcatcatcacattttttatatgttgatctaggcaatagaaatcataaatttcttcaaacgttgtttttcgcttaggtttaatgaaatcatcgtcattagtttctatgaaaaaatgatcaatattttgatacataatttcatgatagccataattagcagttacccgatcaaaaagcttttcatcattaataattaaccctatgtcacgccaaaaatcgattctaatttcagaaagtaaatcattaatcattgagctgtctcctatttcatcgaactctccaacaatcgtaaatcgtagtattaccactaatctattcagcaatgtataaacatcaacaccaagaacttttatcctcttcctataatctaataaaaacgctatccaaatggataacgtcttcactcccaattaatctgattcttcagcggcccgtgtagcggcattttcaatagttttaacaggatttaatctaacacgaaagttaaagtagcccacgtgctcatcatcttcaaaaccatactcactataatcaccccaggaaacatagttagatgttcccttaattctgtaaaatagttgggcaatatcaccactgcctagaacaactggatcaaccgctctaatcttttgtcctttcttaacggattgcttagttttctttaatttagaattatagatgtacaaatctgtctgcggaacaatcgtagttgcaccgccatcacgaaatgccggattgccattgatgcgaccaacattcattgccttgatataagcacctctgccaatgtaataatagtcttgacctttaatcttataattcttaattgcatatgatttactaccacttaagtttgtgtaatagtaatcgtcagtttgtgtcttagtgcgacgcttaccagcataatttataattgagtatttaggaaaaacctgttgtccattaaagctaatacgcttaccattcttattgtaaatagcagtgttagcattcagcttcaaaacgcctttgccattcatggtattaacgttattagactttaaatacgtcccatcacctaaattaaaatatgaatcaggataagtagtccaacttttaccagcatatttaatcttgctacctttagttaaataagccttgccaccgcgataagttgataaacgattacccttgctattgtaaatataggtgtttttaataattccgatctcattattattccagttatagctaccaaccgatttcatgttgacataaccaccatcacctaaatctgcataggtttcaccattaacaatagcttgtggcatcccattaagattaataaaagcactgaccctgggtccctgaataacaattggttgaccataaaaattgatcggtttcttaaaatttatccgatcttggctacctagctctttaccattcttattatacaaagttggattggtatagctcttaacagttgtaatcttattcttcagagtacttgcccgaactaccggtgttaattgattttgacccgctaaagctgcaggaacaaaaagcgcagttccagccacaatacttaatacaattctcttaagtttcataatttatgacctctcttaattattttacccttgcatatacattatagtccctttaatataagtcactgataaatcatgctttgcctaccgtttagattcaaaatcaaatctgcattatcttccattacttgccttcttttaccgaaaagcatcaaaattgagaatagcaatggaacgccaacaattaatacagtataaatataatcagtgatttcgccattccaagaccagccagcagaattccaaccagattgcaaatcagaaatataatccattaaaaagtgatagatcatcggcaaccatagttttcctgtatagagatacaattctgcccagataaaggcgctccccattacgccaataacttgtgcaattgttgcagtaaaactttctccatgccagcaaaaattacttaaatgactaaggccaaacaaaattgctgaaccatagattgcaacagggatgcgatactttggaaatctattaaaaccagctaaaaaaattacgatcaataaatagcgttcggtttcttccaaaattccgggctcaatggctgcagttaaattaggaattgagaatttaaatgaaccaatgtcaacaccaaagaatactgtccaaattgctttatcatagttgataaactcattgtaaaacaaatcaatggttgccatgatcaataaagccagcaagatcttcttctgaaagcttggacttttaataaattttaagtttggattgaagtgatagccccaagctttaactaagaaacaagtcatcgttaataaagcaatagctgcgattacaccttgataggtaagtgaatgaagccagcgaaaatctggatttattgctaaattttgtgcatcaccgtactgaatatcaagaaagtaaatagttagcaagcgtaaaaaccaatttttaatcggtccaacatgtacaactgcaattggaactagcaagaaaatataaaccgcccatagcagtaatactaatagaatctcgatagccggcaggttttttagcaaaaaattcccagtgatatgccaaatttggcaaaaattgaaaggaaaaattactatggtcagccagcgaacaatttgagtattagtcttgctggaatcctttttaaattgcacgtaaaagttcaatcccatgatcgccgtactaaaagctagattgaacaaatcccctataaaataaaaatgattattccgctgagaaaaagtataactaatcatcaagagaaaccagataatcaattgatagttaaaaactttctgccagaatttccttgaaaaaatgcgttctttcactttgtcaccttcctcgtattatataaattgtaattagtcatattgtgataattaatcaaattagtatttgctttttgatcttcacatgttagcctctaattgtcattggctttggtcaactggtctaggttatcacctcctgcagttttgtctgctttataagtctgccacccagacagttcctttatgctctaactcacatgctgtattgattgcttctttttgctagtccttgagcaattgggattaggtgcagctttcaaagaagcaaccagtgaatacttatactggcgagattgaacttaagaactgtaattaggggttaacatgtgaagatcaaaatctatgatcagaaatttgaaagaaaggaggccatttccaatgaaattatttgtcggtattgatgttagttctaaagatttacaggtcgttgcacttgattcagaagatcaaaacaaacgcttaattaacgatagctttgtcaatgatctttatggtgctagtgaactgaaaaaacaaattttagatctagctcaaaataaacactatgatcaaatcattattggcatggaagctacatctatttacagttttcatcctgcttactttttccaaaatgacgaagatttacaaaagctcaatgtagagactgatgtaattaaccccaaagaaaccagcaggtttcataaagtctttgaagaaagtaaaactgatcctctcgatgcttattacattgctttgtatctaagctttggacattatcgagtaagcattgccagacaagacaactatcttgctttagagcgtttaacgcgtaccagatatgaattagttcaagaactgactcgtaccaaacagcacttcattgaagctttatattatcgggttaataaactaatcactgtcgataaagataagattaatactcctcttttcggtgctacaatgatgtctattgtaaccgatagtaaaactctggatgagatcgcggatatgcctaccgaagacttaatttcttacttacaggttaaaggcagaggacgcttttccgatccagataccttggctaaagcaattaagaaagctgttagaggttcatatcgcttaggcaaagtaatgactgattcaattgatgcagtgctttctgttcattacaacatgattcaaagctttaatgaatctattaaagatctagaaaaagcaattgatcgtatcgttgatgcattaccagaaagcaaaattctggaatcaattcccggtattggcaaaacctatacagctggtattatcgctgagatcggaagtatcgatcgctttgataaagaagaacagctggctaagtatgccggcctaacctggaatcaatatcaatcgggagatcacagcaacgaacatactccaatggccaggactggaaacagatatctaagatattacttgattgaagctgccaatctagcaagattacatgatcctgttttcaaaaaatattaccaaaagaagtatgatgaagctgtctactcgccgcataaacgtgcttgcacattaactgcaagaaaattagtacgagttatctttaaattgctcaaagatgacaaactgtacaggacaccgaggtcttaatttcaaaaattggtctaaatttaaaagtaaacaaaagtttaacattaaaaaaatcaacctttaccaaggcttagtttcatatactcaaatttatgatcaaaaagaacaaatatcatcgcctttcatttgacttattaccacatgacttaagtttaaatatttttagctaattaaatcgcttaaattaataacaattataattcctgaattgtcaaattaagtgcaacagttaggttatgaagagatatattgcttgaagagttcctctgctgtgtgatattggaggattcggcgatatttgtggttaatggcatcagttgcctgttgaacataagcttttgacttgtctttcatgctcttgcccttagggaagaattgacgcaaaagaccattgcagttctcattggtgcccctttcccatggagaatatgggtgagcaaagtaaatctggcagcccttgatcttggtcatatccgcaaactcagagccattgtcaaacgtgattgatttaaaccaggcaggatgtctgtcaatctccttttgaagcagcctttggcatgtgcttgcccgatagtcaggaatcttgataactacttcaaagcgtgtggttctttcagtcaaagtcattaaagcaggctgattcttgcgtctgacgcctttaaccagatctccttcccagtgcagcggagcttttctgtcttcaacctccttaggacgctgttcaatggaattgccaagatgcttcttgtgcaaagcgtgaccgccatggctgtgatgacgcttgttcctgcgtcttttgagcttcataggcagatcaatattgcttatgtccagcaagccctgatcaatatagcgatagacggttggtgtgctgggacaagggtagcctggcatagtccttttgaattcaccaacgaactcatcgatgctggtggcatcaaatttagctttaaagcgtctggagagcattctcaaaaagacagcataatgcttcaatggattgcgctgatagcagtttttgcgacgcttctcataataaatctgtgcagtatcagcgtaatagtgctcatacaataaatagctgctgtctctttgcaggacacttccgcgtttgatttcgcgactgattgtcgacttatggcagccgacttcttgagcgataacagtacgggaagttatgccggaatccagcattgcttgaatttgtccacgttgtacgctggttaattgatgatagtgcttagaaatgctagaatttgaattggtcatgaagatcttcctttcttgatttttcgtcacttcaagtttaggtcttcatggcctttttgtttaacacttagtgttgcacttcaattttaaatccgggaacaattataattattttcgaagcattttatttcttattttctaatacctaagcctctagagaaaaaaagtcctattaaatcttggtacccaaaccttgatttaataggattttgtttatgcctcaagattgctcttaggcatttgtttcttctcatttaattttcttaacttagcggcttttttcttagtcaaccgagggaacttcaatttaaactggctgccctgaccctcaacagattcaacactaattgttccgttataactagcaactaatttttgtgcaatcgatagacctaaaccattgccacctttttcacgggttctagccttatccacacgatagaagcgattgaagattttcttttgatcttcttcagaaatcccctcaccaaagtcttgcacaataatattaacattcttcttagttacaccagctgaaacattaatctgcttgcgatcagtcgaatatttaatcccattatcgatcaaaattactagcaactgttccaaatgaccgtgatacatttgaatctctgtatcatcaggtaaatcatcctcatccagctgaatcttgaagtcaggatgaaccattgccatatcagcgaccactctgcggatgatttcattaacatcacttacttcatacggatattgaacatcgatttgctcggctcgagttaaatcaagcatttcctgaattaaatgtttcatccgatcagcttcttgcaacgaagccttaattgattcatccaaaatctgcggatcatccttgccccatctttcaagcaggttcaaatgcccttcaattactgccactggtgtccttaattcatgtgagacatcaccaacaaattgcttttgttgctcaatgtaaccttgcatccggtctagcatttgattaatcgaagtagctaattcttctaactcatcatctcgatgtagttccttaattctagcctcactattaggatcagcattaacttccttagccaccttagacatcgtcttaattggccgaactacattaacaaccaaaatataagaaattgcaatgaagataattattgcaatcagtgaaataattaccatccaatgaagcaaattactcatcaagctattgtaataagtcatactattagaaaccactacatagccagttaatttgccatttacctcagaatagattttctggtaggttaaaagcattttgcctttttttcggtttactacttcttcaagttggttgccggcaaattcttttagcttaggtgcagaattaccattagtaaaaacaatttcatcatgtttgttgtaaactgctacattaatatctggattcgaaatcgatgaaatcaggctatcactaaatgctttattctctgtatcttttttgctaatagcaggaccgcccctcaaaatacgcctggtagacggtgacagagcaggaattacatttgagatctctagctcatcttgaatagaacttaatgtccggtccatcgtggtaactacattattagatgtctcttgttgctgttccatcgattgatgactaacaatttgataggcaacaactgaaaatatgacaaaagagaccgtaatcgttaatgcaacgatactaacccatcgcacaattagggatgagtgcttggcctctttttcctcgtctttattcttgatcatcatcttcatctcttaccatataaccggtaccacgaaccgtcttaatgtaagatggttgacctggagcgtcaatcttattacgtaaataacgtacataaacttcaactacgttagtttcgatattagattctggaccccagatcttgtttaataattgatcacgactaactacgttgttcttattttcaatcaaggtcattaataagttgtattcgcgtttagttaaatcgattgccttgccatcaccacggtgcacaattcggttagcagtttcaattgtcaaatctttaaattttacaatcttttgcttagcaacagtaacctttgatgcgtccttttcgattttaacgcgacgtaacactgcgcgaagacgagctaaaagttcttcaattgcaaaaggcttaacaatataatcgtcagcgccatgatccaaaccagaaacacggtcgatcactgaatcacgtgcagtcatcatgataattggcgtagtcttaacttgacgaacacgacgtgcaatttccaacccatttaaatcaggtaacatcaagtcaagcaagatagcatcaaagtcttgactcaatgcatcttctaatcccttacgaccattattctcaacaacagtctcgtaattttcatgttgcaattcaagctcgacaaagcgagataagttcttttcatcttcaataattagaatttttgccatgttaattcatttcctcgtagatcaatttggttttctaatactaataaattaattaaaaaatgcttttataattaaaggatactttaaaagtgcttctaacacaagattaaaaaacaatcaaagtaaaaattttctttgattgtccaccatatttttcaattacatttattacttatttttattgtccttatcattatcttgcccatcaagcaagaccttcaatttagcaaaagctgggttaacttggttcttcttgccttcttcaaaagaggtttcagaaacaacttcccaaccttgaccctctgggaaaatattcttttctttttcttcaggagtcaaaatagtagttggaatatggagtaaaatattatcttctaccgctgtttgcaagtcaatttggtcattctcaacttgtacaatagtatcgttttcttccaattcttccttggttggcttacgatcaaggtagttttcagtaaaagtaaaatcttcatgatagtttaccggcttaaggcttctgcttgatggcacaaccagatcagcggccacatgaaaactgccagtcacaaatggttcttgatagaacaagtcaccgctcacttttacatttttcgcatcaattagtagatctttactacgcttaaaaaattctggacgcatttccaaatcacgttcaatgtgagttaatggttccttggaattttgaatcctagaaaaactaagttctaacatttttacacctcgattggccgtcgaccaaagttttgatcaacgcccattatttgttcaaataaacggtctaccctaacttgtaaagctaaagagccgttcttagcacttcttttatcaactttagagacgatttctgtctgaaattccttgcgctgttgctttaaatatttgcgacctaccttactaaagcctaagagcatcaaagactcatgattaaagctagccaatatatcatcctgagtgacattaagcaaagtatataagctcaaacggcgcaaacgggaataagtataacgcttggacttgatatgccgcaaaaattctgtaaaatcgcgggctaaatgaatctcttgtttcatcttatattcaagcccttcgctcatttgataaatatgacgcaattcttcaactgaagatgattcaatttgatacttcaaaaatggatatagcaaattccaattaggataaattttctgctcagctaacaccattgcttctgctttaggcatccaatactttaaattttttgtatcttcaccatgcaataataaatttcgaatcgcactagcactttggacaactttttctctttgtaaaaggtcatcatgtcctgctccaattcggttgaccggatgcagatttaatggtgaacctaaattatgattagctactgaatacgctaaccccaaaatagcatttggctgattaacttcatagcctacttcatgcgctaccatttggttgtattgtgttgaataagtttggctataatctctaaaatccatgtgattctggggaatttccgcaattcttttacccaaataagcaaaattcaggttagcatcttctacaccaaagactaaatcagttacgcctaatttagcaagttgttcaatgtttccgagagcaaaaagatcagctggttctactgccgttgaaaatggtgtttcaaataccaaatcggcaccagattgcaaagccaccttagcccgctcccacttgctcataatcgccatctcaccacgttgcacgtagttaccagacatgagcaccacaattggatcattaccagcaaccaagcgtgcttgatttagcaagaactcatgtccactatggaaaggattaaattccgcaataatcccaacaacactcattgcttaatcttccttcaattcaacttgcttaccgttagcccatagcttttccaagttataaaattcacgtgcttccttagtaaagacgttgactacaacatcacctaaatcgagcaaaagccagttagaatctctggtaccttcaatacggtagtcagtgtagttgttttcgtgagccgcatcaacaattgagttaacgatcgcatgtaattgacgattagagcctgcactggtaataacatagtaatcagctaaaatactgattccacgcatatcgtaagcttcagtatcttcaccatgacggtcactaattgcttgggtagtaaaatctaaaatttcttgactagtcaatatttttctcctttttattacttaattccccatacattgtatgcttctaaagtacgaggatatactttatttttattttcaattaaaaactctaaggtgtgctgcaattcatagcctaccccttcatcaagactagcataagcaactttgcgcgcttcttcaactcctggaaaatctcgtccgggttcaataaaatcagctacaaagataattttatctaatgtagtcatcttagtatcaccagtcgtatgacgacgtacggcagttaaaatctcaggatccctaatttttaaatcacgttcaataaagaaaatccccacaatgccatgccagatggcccgattccaattaagcaaatctggatcaaaatcctgttccttaattaccttacgatactcttctaccggtacctgcttggcataatcatgaacaaagccagctaaggctgctttttcttcatcatatccatttaacttagccaacttacgtgcagtttcactaacacgaacacaatgttcaaaacgttttttcttcatgtttgccttttctttagcaacaatttgttcactagagaatggtgaataagtatttttaaaaattagtttcgtcaaggtaaagccccttttcttcaatatattctctgacggcttctggtaccaagtaacgaattgaagtgccagttgcgacactgcgacgaatagcagtcgaacttaggcgaatatctggtgcgtcaacccaaatcatgggatattgcggatcttgtggataacctggacgacgaattccgaccaatgttactagtttagccagggtcggagcttccttccaagtatggaaactgttaacctgatcactgcccataatcaaataatagtcattctgaggtgctttttccttgagataacgcatagtatccacagtataagaaacgccgcctcggaacaattccaatagttttaccctaaagttaggattatcgcgcgtagctaaatcaagcatcgttgcccgatctttagcagaagtcagcggagcatttttatgcggtggaatattatccggaataaaccagacctcatccagcttcaacttagtcattgcttgctctgccgctaccaagtgcgcaatatgcaccggattaaaggtaccacccataatcccaatctgacgacctttaccttgttcttgttccaattctgcttcaactttagcagttggcattttttcaatacattttggattaaccatatgcaaacctctaaatcaatgcacgacgaatacctaaaccaatcccatctggtgtgtaagtcttaacaacgcatcccttgggtacagtcacaaaaccaattccaccaaataaaaggtcactcttatattccgttctaaattcttgaccctttagtggtgccatttcatcatctgcagctggtggggataacaattcacctttatgctttttataaaagtcatccgcattagctgtcttagtacggtgaatatacattccacgagcaacgtaaacagtaaagctagtcgattcgcccttgagataatcaatccgtcccaaaccagctaagaataaagtattaccaggcaataattggtaagtagctggctttaaaggcttcttaggtgagaccagctccaaatccttagcatttaagtgcgtagccaattgattctcggtcatgatcccgggcgtatcaatcaaaaagtgaccattttctagaggaatttcaattttgtctaaagtagttccaggaaagcgtgaagcggtgatcaggtcttgaatatcacccatcatgtcaataatggcattgattaaagttgacttaccaacattagttgtccctacaaaatagacatctttgtcttgcgattgcttattaatataagcgatcaaatcttccaagttcaacttctttttagctgaaaccaagaagatttccttaggataaagccccattcggttagcttcttgtctcatccaatccttaatcttactttgcttagagtttttaggaaatagatcaaatttattaccaactaaaataaaatcattatttccaacaaaacgcttcaatgatgatagcaaagaatttgaaaaatcaaataagtcaactacattaacaattaaagctttcttttgtcctaaagagttaagcaaagctaaaaaatcatcgttgttcaaatcaactggcatgatttcgttataatggcgcaatctgaagcaacgttgacaataaacatccgcattttcttcttgctttgccttatctagtgcactttttggcagataacctgctttttcaggatcatcggattgcagcttggcaccgcagccgatacaaataatatcctcatccatttgatagctccttcttaaatgttactcgatgtgataaacccaggaagaaaaagataattttttcaaagaaacgattgattctcgtattccacttatcagtttcaactaatggcttaactagaacagtcttcacgccggccaaattccctgcttgcatgtcagtgattagttggtcgccaaccatcataacctgatctttttgcaaatgcattgcttcgcgcttcttggtgatcgcaaatggcaatggcttacgtgacttagcgacaaattcgatatggtaaggatcaagtaccttgcccactctttgagcattattgttagaaatgaccacgagagtgattcccgccttggctaacttttgattaaaattatccatttctttggcagtttcaaatttattccaggcgagcaatgtattatctaggtctgaaaaaaccgccttaatgtccatttcattcaacttctgggggtccagattgtaaatcgtatcaattgtatattttggtctaaaaagcatatcaacactgctatataaaacatagaaatatgtagaagaatgtatatttttttacatatcagaaagaaatatagtccttcctttcttcgctttatttactgctgtcatcattagtattccaatattccaatctaggagtaatcgcattgactaactcttgcagcttaagggcttagccagccccgttttcattattttgctaaagctaaaagatttaacactgcattatcatcacgatcattagtataaccgcattcataacaaatatactcattgtgcttagtgtgatgtttttggttgccttgcaaagtgattttttcatcaccttttttaacataaccacaattagcacatctttgggttgatggatatgttttatcagccaagattaattctttgccataccactcacatttataagtcaatatctgtctaaacttactgaataatgatctctgcatgccttttgaagcgacgtgcgtcatcatcatttgtttaacggctaggtcttcaatcactatttgatcataattattaaccaattttgtagtgaatttttgcaaaagatcgttttgaatgttggctactttacgataatcacgttgcagtttggttctcacttgcacgtaattattgctttggccagctaacttgccattagcccgtcttttcttagccagcattctctgataatgcttaatgcgcttgtatagtttttgcaatcttgatggcaaaacattgattttgcccccagtgtagttgaaatgtcccacattaacatcaacagctgtctttctacctgttctaggctttaccaaagtttcttcttcataagaaagagcggcataataatgtcctctttctctaaagacactagcaactttaatttgcttcatttttaaagcttcatatgttggaatatcgaaccaggttttaatgcctctgggcttgtctaagcgtagcttaccattaaccactttagcccggtcagtcttaaagccttgtcgcggggccttctttgatttgaaatgtggtttcccccaatcaggctgtgccttatcaaagaaattcttccaagcattagccaaatctttgactgctaattgcaagcatctagcagacagagcaaactgccagtctgccttattatcgactagctcatcacgtattctgcgctcatttggactgggattattatccttatctaaggttcgtgcttcatacatgtcttgccaagtggctaaagcttgattccagcaatatctgcgataatcacaaagcttatccagctcttgttgcatggtcttgttaggttttaattcgactacttgagccttgatcatttgtttcacctccaatacaaacataaatttagcaaagagtgaaataaatacaagcgaacaaaatattaaatttttagtttttgacctgcttctatgttttatatttctgaacagatctttgtatcttgtctatcttttaactgttaatttcctccattttttatcaccttatatcatatcaaaaatgggtttgctttagaaatttttgtttttttctgatgaaaaagtgttacaatactaaacaatttaagcaaaatcatcaatcaacagaaaggatcaccatgagaaaattcatcgatttacaccttcacctcgacggttctgtcccagttgctactgttaagaagttaatgcaggaacatcacatgccacagttaactgatcaaaaattgcggcaagaattgtcagttgataattcttgcgctagcttggaacaatttttggaaaagtttgacttacctaaccagttaatgaagacaaagcatgatctggagatgattgtgtttgatcttctttgcgaattaaaacaacaaggtctagtctacgccgagatccgctttgcaccgcaattacatactaaaaatggtttaacgcaaagacaagtaatcgctgcagcagtcagcggtattacgaagttttatcaaaaacaaaaagcagacaaagatcagcctgaattacacgctggtttaattctctgtttgatgcgcttcgcccacaatgaaaaagaaaacatggaaacggttgagctagcgaaagaatttttaggtcatggcgttgttggccttgacctagctggtgcggaaggcccgatccctcacattaactaccagcattttttcaatcgtgcccaagaattacaccttccttataccatccatgctggtgaggctgcgggacctgattcaatccgtcaagcattaaaaattggcgcgaaacggatcggccatggcattcgctgcactgaagatccagcacttacccaatatctgattgatcaccaaatcatattggaatgttgcgccacttcaaatatgaacaccaaagcttttgatcagattgattcttacccaataaaaaaattattgcacatgggaatgaaagtcacgctaaattctgatgatatgatcgtttccaataccaatttaccgcatgaataccaactgcttgaagaaaagaccgccttgactcctgaagaagaaaccactctttatctcaacgcggttgacgcggcctttactacgccagatgaaaaaattagattacgagcattaattcaaaaatagataaaaaaataagctaggaaaatttccctagcttatttcttttgttattagttcaaagctttcttagcagtttctgctaattgtgcaaaagtctttgagtcgttgtaagcaatatcagctaacatcttacggttcatgtcaacaccagccaacttcaagccgtgcattaacttagaatatgagatgtcgttttgtcttgcagctgcgttaatacgagcaatccataactttctgaattcactcttacgtcttctacggtcgcggaatgcgtacttgtatgaaacgaataattgagtgcttgcagccttaaattgcatgtgctttgcgccacggtaacccttggcaagcttcatgatcttcttacgacgttgacgtgttactgttccacctttaactcttggcatttaaaattcctcctactatagtctgtcttaattaagaacaagtattagtgcatttgagcaaccatttgcttgatacgcttcatatcactctttgaaaccatagcagcttttctcaagtgacgacgttgcttctttgtcttaccgtggaaacggtgaccagtaaatgcgtggtgacgctttaaaccaccatttgcagttctcttaaaacgcttagcagaagcgcggtgtgttttcatctttggcatatttctatttcctccaattaactactttttctttttgtccttatcactcttaggtgcaagcatcaagaacattgaacgaccttccatcttaggcttactaattacattagcaatgtctgaggttacttcggccattttttcaagtacttgttgacctaattccttgtgagtgatggcacgacctctaaaacgaattgagacgcgaaccttagctccttctttagaaatgaacttacgaacgtgcttaagtttagtttcgaagtcgttaccttcaatagttggactcaaacgaatttctttgacactgactgtcttggaattcttacgggcttccttaagcttcttttgttgttcaaagcggtacttcccgtaatccatgatacgtgctacaggtggcttagcatttggagaaatcagagctaagtcaagacctgcatcgcttgcacgacgtaaggcatcacttttactcatcacaccaacttgctgaccatcttcatcaattaaacgaacttcgcgagcgcgaattctgtcgtttaagattaaacttcttggtataactgttcacctccgtgttaatttgaggacaagaaaaaggcgggttataagaatcatacccgcctttaatcaacagaaattatcaatcagcctagaggtttacttaacttaggcgagaagcgggtgcttcttcttgttctcaactagtagtagtatactcgcttaaccattatccgtcaattaattgttgacaattaattgacttttttatcttgtttttgataaagcttctacaaaccatttagaaaaaatttctggatctacagacactgctatttcagcattatttggaagatctagcttatttttaaaatccatcaatgaagcaccatatgtataaccggtttgaacatcaatttctacatgtgtatttttaaatttaaacatttgcggatttaaaagtacgcctgctgcaagtgcatcataaattttaaggccagtttgaaaactgccacctcgaaatttcttaaataagtcgtaaaacatatcaccagcttttcctaactgtcgtatttgattacttacttcaggcataattttagcttgtgcacctaattctaaaggcgctactctaatttttaatccactttcaaaaatgatttttgcagcttcaggatcagatgcaatattgaattcagaatagataccataattacctctacccattgctccgcccataataattagttccttaatattttttatatcatctgggtataaacgaacatatagagcgtaatcagtaagtggtgcaattccaataagagttactttttcagaagaagctgcaactattttatgtatggcaaccggtgatatgccatgatccaccaattcaaaactaggatttggaaaatcatatccgtccattcctgatttaccatgtatttctttagctcgaatagattgtttgactaatgaacgctctaccccttttactacaggaatacttttaccgaaaaatttctccaatttcaatatatttattaaagcttgttgcgcattaacattgccattagttgcaataatacttttaacttcaattgcaggcgaaaaaagacatattgctaatgcaactgcgtcatctattcctggatctgtactaataataactggctttttcattaagaactccacttcctttttggtaatgttcgtattttcaagaagataaatttataaataaatctatttatattcataaataatacaatacgcatacaattaacacaaatgttattattttaattcatattttgtattgacttatttttacatttaaattattctaagacaagataaggaggaatacgaacaatatgaaaataaaatccagtttttggctgctatttccggcatttattagtgtcttgatttttgcattctttccattaattcagattgctataccaacatttcaagattctaaaggatttttgcacctatacactgaatttctaaaaaacacgtacaatcttcatgtaattggtagaacatttaaaattgctttactcactatgatcattgttttaattcttggaattccaatttcactttggattgctcgtcaaaagagcaaagtaagatcaattttaacaattatcattctttttccaatgttaacgaatgcagttgtcagaaactttgcatggatcattattttaggtcgtaacggtattctaaataaatttctgatgtctattcatttaattaattctccattaaacattctttatactgatacggcaattatcatcggttcagcttatttatttctcccgattatgattatttcattagttggtagtatttctgagctaaacattgaagcagaagaagctgctgctgtattaggcgccaatccatgggttaatttgataaaaattgtaataccacaattagtctcagggattttaacaggatgcattttggtctttgcaggtgcgatgacagcatatactaccccacaaattttgggaggtaataaaaatttagtaatgtctaccttgatttaccaacaagccatgacattaggtaactggaaaaatgcaagtgttattgcaatagttctgattattatctctgctttatcaatgatattaatgagaaaagcaagtcgcgctttggatagagactgtaaaatagtttgtgtaaggatgaatgattccttaaatttatttctttaaacattagaaaaaggagttcctttctcgtatgattggtttgaacaaaaaaacacatacagaaagaagaactccttcatgaatgattttaccaaagattttgctcaagctctattcaatccagacaaaataaatgatttattgcgcaaagagctacaacaggctgttaataacttgttagaagctgaattgaccgcctttctgggctatgatccctatgccagaaatggctggaatactggcaactctagaaatggtgcttatttccgcaaagttgatacgcaatttggcccaattgaagtgcaagtgcctcgggatcgcaacggtcaatttcatcagcacacgctgcctgactacaagcagcactcggatatcttggaaagcatgattatcaagctttactccaagggcgtgaccaccagggaaatagccgatctaattgaaaagatgtatggcagccattacagtccagctcaggtatcaaatatttccaagcagatgattccaaaggttgaggcttaccacaaacgcaagctaagcgacaagtttttctgcgtctatttggatgcgacataccttcctttgcgccgagaaacatttgagcgtgaagcagtctatattgccattggcatcaagcctaatgggcacaaggaggtcattgactactgcattgcacctagcgagaacattgaagtctggacagatatgcttcaaaacatgaaatcccgaggcttaaagcaagttgagctttttctttctgatggtgttgttggcatgaaaacagccttggccaggacttatcctaaagctcattttcaacgctgtttggttcatgtcatgcgcaatatctgcgctaaagtacgcgtcgacgatcgtgaaaagatcatgaacgaattcaaacaggtgcatcaacagacaaacaaagaagaagccacagctgtcctgcatgacttctataccaaatggggcaaggtttacagccatgttatcagaagcttgaaagacatagaaccagatctgctggtcttttataactatcccaagcagatcagagcttcaatttattcgactaacatgattgaatcatttaacaatgtgatcaagcgcaaagctaagcctaaggcatagtttccaactgaacagtcgcttgatgcttttattggcattcaggcaatgagctacaatgaccgttatttcaatcgaattcataaaggctttggtcaggttcaggacaccttagaatcctactttgattaaataaataattaaaaaatcaatttacgagaaagatctatttacacaaaagatttgacagtttctttggataggagacctaatattaatgcttaatcgtaaaaataaaactttagcaattatttctattattatcctgatattattgatgtttcctctacttttagtaattattacttcatttaataatcaggattcaatttctctaccaattaaaggttttactttatcctggtatgccaatatttttcagcaaccagattttatcagtggatttgaatcaagtttgttcgttgccattattgctagtctttcggcattaataattggtatccctgcagtttatgctttaacaagattcaacatcgttcataagtcttggtttcactctttcttcttaagccctactctaattccagaaattgtaattggctttgccttatatcaagctgctgtcgttactcttagactacctgttatgcctagtctaattattggtcactttttattatgcctaccttatgtaataagactagttacagcaagtatgttactaatggataaaaatattgaagaagcagcttgggtttgtggatgttcacctcagaaaggattcttcttaatcgttttacctaacattaaagcaagtattgtagcagcctttatgatgtgttttattaattcatttaataatattccaatttcattgttcatgaatggaccatcaattacaatgctgccaccagcaattttgaactatttacaaaacaactatgatccaactgtttctgctatttctgtagttctaatgatttttacagcattaattatgcttttaactgaaaaactagttggtctaaataaacttactgataggaacaattaaattggcaattttagaagtaaaagatttagcaaaatcatataacggtaaaaccaaagtattaaaagatatttcgttttccgtaaaaaacggtgatttagtatctattctaggaccctcaggttgcggtaaaacaaccactttaagaatcatagcaggtttaattccagcaacagacggacaagttttagttgatggtgaagatgttggaaaagtaccagtttacaaaagaaactttggaatggttttccaaagttacgctttattcccacatatgaccgtctttaataatgtagctttcggattaaaaatgaaaaagatgtctaaaagtgacattcaaaaaagagtcgatcaaattttaaaaataaccggcttgtctaaattagcttctcgctatcctaaagaattatctggtggtcaacaacaaagagtttctttagcacgtgcattggtagtcaatccacaattattactaatggatgaacccttgagtaatttagacgcaaaattaagaattaaaatgcgtagcgaaattagagaattgcagcaaaagctaaaaatgacagttctttttgttactcatgatcaaagagaatgcttcgctatttccgataaagtattaatcatgaaagatggcaaaattgatcaatatgatactcctgaaaacatctttcaccaccctagttcagaatatgttgctagattcatcggttatgataatttcatcaatgttgatgaaattattaatgatcgccaaattaaaagtaaagatcttgttttcttaactgatgaaaataatattcaagctaaggtattaactattagacccgaaaatattttgattaattcagaagaaaatccgtctaataatttgattgatggaacaatcactagtcttgagtatttaggtcagagctttaaatataaggtaagtactagtctcggagacttcactgttgaagagtctaggaaatcgatgcgtagctcaggagataaagttcagctttatttgccctccaagcatcttcatccgttgtctagataaccaattgtaaagaaaggaataaaaatgaattttaaaaaagttggtttattagctgcaagttttttattagttggttcagttgcatttggtacaactgcatgttcatcacaatcatcttctaacggaggaaatttaactgtttcaacctttggtttatctaccaaacaaatgcggaacgatgttttaaatccttttgctaaacaatcatcagttaaagtaaaaactcaatttggtgatagtgcaacaagacttactcaaattgaacataaccctaatacaggtgttgatgtaattgaacttgctcaaaacaatgctgttactggcgataaaaagaagttatttaagaagttagacttctctaagatttccaatttcaaatatttatcaaaatcagaacaaaaactagctaaagaaactaatacagttccttataccgtaaacagtttgggtattatctataatccaaagaaagttaatattaattcttggaaggacttatggtcatctaaacttaaaaataagattgctgtacctgatatgacaactacttttggccccgcaatgttatatattgctggtgactatgctggtactagtgtaactaaagacaacggaaatgcagcatttaaggcaatgaaagaattaaaacctaatgttgtcaaaacttacacccaaagttcagatttaagtaacatgtttaaatctggtgaaattgaagctgctgtagttggtgattatgctgttggtatgcttcaagcaactaatccaaacttaaaatacatcgttcctaagtctggtacatatgctaactacgataatgtctctattttaaagaatagtaaaaattcagcagctgcatacaaatacatcaactttagattaagcgaaaaaattcaaaagaaagtagcaggtcttaaatctttgaacaacgctcctgtaaacactcaagttaaattaacacctgcagaagcagcaaacaaaacttatggctcagttgctaaaagagcaaaaactattaatttcttctttgtaaattcacatatgtctaactggatttcaagatggaataagattatgaataaataattgatgtttattccctataaggagctgaattgtagattcagctccttatcttttatggaggattttaaatgactgaggtagacttaattatcaaaaatgctcatgtttttaatgtatatttacgaaaatttcaagatgttcaagtaagtattaaaaatggcaaattctattggattaataaagaattacctaatttaaaagcaaaaaaagtcatcgatctacaaggtaaatatttaatccctggttttgtagatgcccatatgcatattgatagctcaatgactacacctaaaataatgggtgaaacaattctaaaatatggcacgactactattattgctgatgatcatgaggttactaatgtcgccggtattaatggattaaaagatttcattaatgaagattcgccaattgatattttcttcggcatcccttcttctgttccttcaaccaatcctcaaatggaaacaactggcggtaaaattggtgtgcctgaagtaaaagaattacttaaagatccacgctttatttgcttaggtgaagtcatgaactttaaagatatgacttctgacaaggacactctaattaaggacataattaatacttgtcataaaactaaacctactatgccaattgaaggccatacccctgcttatcatggtgaagatttagctaaaattttatatgccggtgttactactgatcatactcaacaaactagagatttagtcaatgaaaagataagaaacgggatgtttgttgaagttcaattaaaatccatgcatccagatgtcatcaatactattattgataataaatattttgaacatgtagccttagttactgatgattcaatgcctgatactttgttaaaaggtcacttaaatttattagttaaaaaagcaatcaatatggggatgaagccagaagacgccatttatatttctacctatattcctgcaagacatatgggattatgggatcgtggtgcaattgcaccaggaagagttgctgatttctccattctggataatttagaagaactctcaatagctgatgtctataaaaatggaatatccgcaaaagagactatcaaaaatacttctcaagatgatttttcacctaatagtctaactactagtgtgaaagctcctaaattaactaaacaagacctattacttaaaacaaatcttgttgataatggctcagttacagcaaatgtcattcaaataaatcctgtcggtacttttacaaatcatattcaaaaaaggctagctgtacataatcatatcgttgattggcaaagtgcaaatttagctttaattattgtccaagaaagatatggtttaaatgatggtaaatttagcttaggcctagttgatcgtggcattattggtgatggtgctgtaggggcaacctgggctcacgatcaccataatttgatggtaatgggaacaaatatagatggcatgattgacattcaacatcaattaattaatcagcaaggtggttatatagtcgccagaggtgaaaagattgcagccaatgctcctcttccaattggtggagttgtaagcaatcaaccaatgaagattttaggagaacaaattggtaatatacgtaaaaatctcgtagaattgggctataaaaatacaaacgaaattatgtctttctctactttgtctttacttgtttctcctagtctaaaaatctctgataaaggtctttttgaagttaaatcacaaaagaaagtgcctttatttgaaaaataattttcttatgaattaacatattttctatttcgccgattgtaaaatcaaattgaacactttagaaaaataaaaagtccatttggacctgtttgataaaatgtaattaccacaaaacattcagaaacgaggtcacaaatggactctttacattctatcatgcctaagcacgaaaagggaaagtatttatcactagaagagcgagttattatttaaactcgtatcaaggatggcttctctcttagagctattgcccgtgaaattggctgttctccttctacgatcagttatgaagttaagcgtggcacagttttgctttataatggcaagcaaaagcgatataaagcaaaacatggtaatgaagtttaccacttggatcgtcaccgctgcggtcgcaagtcagatttcttaaagaagaatgactttattaagtatgtcattaagcacttctttgaaaataattggtcgcttgatgtatgcgccaatcgctgtctggctataggaaaatttagcagcgaataaacagtctgtactagaacgttgtataactatgtagaccaaggcttgttggctatcagaaactctgatttacccgaaaaattaaagcgtaacattaaaattcatcgtgtccgtaaaaacaaaaagaaactaggtcgaagcattgaagagcgccctaaagtgatttaagaccgaaaagagtttggccactgggaatgtgacctagtcttaggacataagactagagacgatcaagtgctgctaactttgtctgaacgaatgagtcgagagttcttgatcatacgtattccggataaaacggctaacagtgtaatgtcagcttttcaatccttgcacagtcaatatagaaacactggaatgaaatttttaaaacgattacaactgacaatggctcagagtttgcggatctatccaacttagagaaagtatctaacactttagtctattacgctcatccgtatacttcttgtgataaaggcactgttgaaagacacaatggccttattcgcagattcattcctaaaggtgactacatcaataactattctcttcaagaaatcattgatattgaaacctggtgtaattcattgccaagaaaactattggcatatcacacaccagatgaaatctttgaaagagaattagacaaaatctatcaagcagcttaagtgttcaatttattattgcaatttacgctaatttcttatccttgtaagcgtagctgataaagtagttgccagcaccgccgccgacacgcaaagcattaactttcttacccttaacggtcttcttcataggagcatagtagtagccgtcgccgctaccagcaagccagccgtttgcgttgaaatccgtaataccgtggaatttaaaggtataagcttcaaattgtgagctagaaactttgtcagctaatttgtagttagccttttcatcggcagcagttaactttttatcccacttatctgcttctttaccctttaataccttataaaccttgaggccgttaatagtatgtgcagtaattttagttctaataactttaccagcttctttgtgttaccaaacaccacgcgtattcttaggtgtggtgaaaagtttggtagcaccctaactagcagcatttgctgtgtttgcatgaacgctagccaaacctaaaacaactaaaaaagcggcaataaatgataaaacttttttcttcattttttatatctccctttcaaatttatacgtcaattatgccacggaaaattctaatgggagctaaaaatagagcaatttttgccctatttttaaacatgaagatcgttattatttacccaagctgcagacacaaactttacagcgttcctaccacagaacaatgcataagtagaagttattccttgaaatttttgtgggcaagaatcacttttcagggatgaatgaatttattagcaactaaaatcaataaaaagataaagtcccatttttctttacatatttatcagctaaattaaatactagcaatccaataatcaaccataatacggtattaaagatagattcgcttaaataaaacgctaaattgtatggtcgattgttaactgctaatctcatccaactaaccattggacaaattggcaataaacaagataagcattttgtaagattggagtagttttcaaaattaactagtagtatacctaagtaaatatattgaaaaatcactaaggtactgccaattcttttaaaacgtaaaactaagctaacaattaaatagcctaatcccactgtagttagtaaagctaatataaatggaacaatcattattactggaaaactaatccagtgatcagaaattgccattactgctatcagaattaaaattgcttggacgaatgccacaacaatatttgcaatacttttatttaaaaataatcttctagaagaaattggcataagatattgttgttctaaaataccacttttggcattattcatcactgttgatcccatttgggtaagtgtcaatgtttttgcggtagcctttaaaccattagtctaaccttaatttcttaaatatttatatgacttaaatttctgcttagcttgcttaaataactattgccagctacctgtgcggttaatgcgccatgctggatgcctaaatgaacttcatgacgcttctttaagctgtcacgggccgctgcttttaattcctgttcagtcaatacagttatttctgaatcttcaaactcgctgctaagccaaaattccagctctcgattcttgatgcagcttaagatcctaagcatgccttctgctccagattttgaccatttcttgccttgccccttaacacggtaggtatacttgcggtggttgctctcgcagcagccaatggctttagtcacagtcagttttcatttcttaaacggcttaatatcgtcccaatgacgatcaatataattccttaggcgccccagataatcatgattgagctcggtattcaattcatcaattagtcggctttctgcagtggttaggatagttttaactttgtcatagctgtatttgtattccaaagcagaaatcagcttgccttgcaggtcaggcgcaaaatatagcctttctttgattttcttatttaggtgaaagacatccaagaaatgctcatgacgcttgcatagccctacaatgtcatcgaagtctgttttggcatatccagcaccgccatcggcgttgctaagaattacagtatcagaaagatcataagtattggccaggtactccttggcttcgttcagcgcatcaagtcggcttaaagaaacaaattccttggcattgattcgctttctgcgtttcttgcttatattgacaatgccttcacagacctgatagcgatgaaattccaaccggcttttagtgcctttgatcaccacgccatcgccttcaagatacaaaactgggacctttttcttagtgcctgcggcatcatatcttgaatctgcttcttggcccgctttaatatttttcccggccatttttaccaaattgcccacctgcatatggctaatattaaagccagacaggcaattgactgctagagcagtattgcgataagtggcaacgctgcttacttctaagatgtttttgactgctaaaatactgtagcgcttgtatttgtcaaagcccattaattcatccaagggataccttgcttgtttgcctgggcagacatatcttcttctgacatacctaacttcgccaaaagccatattgattgagcgctcattcttcttatcaatctgatagccctgtgctttaaccttggtaatcatttcatcatcaactttagctaaagccaaggccatgatttccttaatcaggtttaagaagaaacagattatttttctttcacgcttaatataattatcttcagactttataatatttgcgatttcagttacaattgaattcataaaagaccagcttctaatgtgttttttgttcttaacatcagactactggtctttttgtttgagctcaagtccaaattcaaaggacttgggcttttttaattatttattcaacttaccgtaaaaaattatacacttagcccatttggctaatagtgttttcaattaaactccacaaaacatagccaactactagggcattcaatgattttcctaaaacgccacctcctacaaggctaccgccccaaaaaatagccataaacattaaaattaataagaaaaattctgaaatataattgaagaggtatctcttatataaatagaattgacgccaaaattcagctttaaaacttatcatttttccttctccgtgtagtacttaaaaatttcatctaatcctctagtcacagtttgtatactacttattggtaattcactcaataatttaagtacttgtgaaagagatgcttgcggtttaacacccaaacgataaactccgtcagtcttctttgtaagttcacagcttgcaagtatatcctctttttctgaggcggtaagttcttgggtgaaatgcacttcaaaaatttcttgtttattcagcttcttcaaactatcttttatactattagaaaagacaagtttaccatgattgattaataaaattttattagctatctcttgagcaaattccatttgatgtgtagtaactagaatccctactccattggcggataacatattcagactcttaatcattatttgagtagcattaagatccaaacctaaagttggctcatctaaaattaaaagctttggttcggcaatcatagcacagcaaattcccacaacttgctgcatacctctactcaatctggtaatagaggtgtatttcttatccaacagaccaaactgtttgaggaaagtttctcctcttttttctgcctctttcttgcttaaaccacgttggccaccccaataaacaaaattttccattggtgataaggcccaatacatatttctagatccttctaataaaacgccagtgtttttcaataaaaagagattgttgtgagttacatcttttccgtcgaatacaaccgttcctttatcaggactaactaaattaagaatcatttttaatgttgtagtttttcctgcaccattaggacctaagaaggcaacaatatcaccactatcaacattaaatgaaacatcagataccgcctttttatgtgctttttgatatgtttttgaaatattatttacagataataaagtcatgcaagggtacctctttcattttttaattatggtattctatttttcctttaactttgcatttattcgtctaacagtgttccataaatgtaaaaaatatccaccgtatgcaatagcgtacataataataaaatcaactgttactctaataaccatctttagtgaaatactaaaattatcaattaggaggtttaacaagaaccaggcaacaaaacagacgaagaaattaataaaaatttgttttttcaatgaccatttttcactattaaaaatccagctagctagataaaagaaaataccaatgagaaaagaaataatcgtccaaaaaagaaaggttttcaaatatatcttcgctgttgcaggattttgaccatttagtgaaaacaagaagtccatagccatccagatcgtaccgataccaataccaatcagtccactaatcagaccgttatataaaagatctttaatatttttcataatcctagcctctcttttaaatcctttattcttctacgagaaacttgtactcttagtccattctccaaaagcgcatcaatattgcctgtatttataatttctagatgatcaataaaatgataattaacaatagcacctctagaaatcattataaaatcgttaggtagaacactttgtacttgatacaatctgcccctataaacatatttttgattttgagtacaaatcattgttttttcattttctatttgaattgcatagatttgagaaaaattaatttcataggcatccccatctagatagcaccaaagaaaatcctgctccgaattcaactctttagtaatccgttcaaatctagcagtcattttctttaaccaaaattcagctttttcttctggtaaacttggatcgatattcaatttaactttcaattgcatccctccttgattgattattagtatacctgcttattttcgttaaattattaaattcaggtgaatggtctaaatttaacggtgagtggtatttttttgcatcaaaaaagctgctagaccacggtaaatctaacagctctatattttcggaatcaatcctaattattttgccttgtaagcagtttctttactggtggtaaatttgtgacccttagcaatataaacctttaaagtaggagtaaagtccaaaactgagtcattaaaagtgtattgttgcatgatgtcagcatcagctgaaacagtagttgatgtttctgccataccaacaacgggtgcggctgcgaacattgcagccacaaaaatagcagctaatttgaaacgtttcttcatatcatattccgccaaataaataataaaaatttaacgatttttttgaatatatagcaacttagaccaaattaaaataacggatttttattatagttcaataatttagatatcattgtcatatagaattagctacaaatcaatagataacaagcaaaaaataaaaaacgactcataactactagctaatttatagcagttatgaggtactttatcgtgcgtctcattttctgtttttaatttcataattatcaacactttttacttagtagcaatccaaccttcgttttctaacattgttttagcatcttcaattgctaatttgtgttctgcaaaatgtacgttgcttaattctactttgttatttaaaacatctaacatatatatcacctttcgattctaattctttattgcctctatccctctcggcatctttataataacactgtttattataaagcgaagtatctaatcgttgatataacagcatttgtgcattaatatacagatataatgagaccgtaaaatagtttgtgtaaggatgaatgattccttaaatttatttctttaaacattagaaaaaggagttcctttctcgtatgattggtttgaacaaaaaacacatacggaaagaagaactccttcatgaatgattttaccaaaaatatggcacaagctctattcaatcaagacaaaataaacgatttattgcgcaaagaactccagcaagcagttaatgacttattggaagctgaactgactgcgtttttaggctatgatccttatgccagagctggctggaatacaggcaattcacgcaatggtgcttatttccgtaaagttgatacgcaatttggcgagattgaaattcaggtgcctagggaccgcaacggcatgtttcatcagcacacgctgcctgactacaggcagcactccgatgtcttggaaagcatgattatcaagctatattccaaaggcgtaaccaccagagaaatagccgatttaattgaaaagatgtacggcagtcactacagcccagctcaggtatctaacatctccaagcagatgattccaaaagttgaagcctatcatcaacgcaagcttagcgataagttcttctgtatttatttggacgcaacttacattactttgcgtcgcataacctttgatcgtgaagcagtttatattgccattggcatcaagcctaatggccacaaggaagtcatcgattaaccgcattgctcccagcgaaaacgtcgagaattggacggaaatgcttcaagacatgaagtctcgcggtctagaacaggttgagctctttctttcagatggcgttgtgggcatgaagacggtactggaaaagacatatcccaaagctcattttcaacgctgtctggtacatgtcatgcgcaatatctgcgctaaagtacgcgtagatgatcgcgaaaatatcatgaatgaattcaagcaaatccatcaacagccaaataaagaagctgcgatcaaagtcttgcacgccttctatgacaagtggaacagagcgtacaaccatgtcatcagaaatctcaaagagattgaacctgatctgctggtcttttacagctatcctaagcagatcagggtttcaatttactccaccaatatgatcgaatcctttaacaacgttatcaagcgtaaagctaaacctaaagcagagttttcaaatgaacagtcgcttgatacttttattggcattcaagcaatgagctacaacgaacgctatttcaatcgaatccacaaaggctttggtcaggttcaggataccttagaattctactttgattaaataaaagattaaaaaatcaatctacgagaaaaatctatttacacaaaaaatttgacagtttcttctaatttttaatattttcttgaacaaattccactaaattaatatttggatatttatcttttatttgtcttactaaggcgttttttctcttcttagatagcggcttttttaactctatcaaagtaatttgcttatttttattatcactaactgcagtaacagaagatattgcagatgacagtttgcgaattttttgattacgtttttcttgttcttgttgacgtttttcatcagcttgttcttgttcatgctgacgctgattaataatattatttacttgtcgatctaattgattttctgcattgggattaacctgagctacttgtacaatattcagtgaatagcctttcaggtcatattttgttaagtttgctttagccgcttgaattttcttagcgttaattttatcgcctgaaactgtaagattaattatttttccttgcgtatcaacattttccttaattaaattaacattgcctaattcattaacaacaagattttgaacattttgatctactagagttttattcaccatctgattagctgacaagatactaggaataattaaaataattactactaaaattatcacaaactctttaaaggtcggcttgtgcaagaaaaacaacttagattgcttagtagaataacttaaccacttcataatttttacacccatgaatgcagtcaaaattatgaaaacacagttaatcaaaaataaatagcttgatcctaaaaaatatttaagattacctgccgcaattgaataccctatcgtacaagccggtggcattaaggctgttgcaatcgctacaccaggtacaatattatttgcttcttttttgcgagctccgattattccagcgacccctccaaaaaacgcaatcatcgcatcccagattgttggtgaagttcgtgcaataatctcttgactagcataagtcaaaggagaaaaatgaaaataaattgtagatgcagctaaactgataataatttctgctaataatgaaattgttcctttacgcagtaagtgaacatcatataaagcaagacctgtgccaattgctagtagtggtcccatcagaggagaaatcaacattgcgccaataatagtagctgttgaattaacatttagtccaatacttgcaataaaaattgcacaagtcaggacaattaaattttcaatatttaaagtcccatcggcactaatcttagataaaaattgagaagttaaataattttttcgctggcgtattatcatcttatttagtctaatccttatgaaaaaagcactgaattaagatttcagtgcaaaaatataaaaatgtagttgaacacatcaataaaattattataacttatttgatcctgaattgtcaaattaagtgcaacagttaggctatgaaggaacgtattgcttgaagagttcttctgctgtgtgatattggaggattcgacgatgtttgcggttaatggcatcagttgcctgttgaacataagcagctgacttatctttcatgcttttgcccttagggaagaattgacgcagaagtccattgcagttctcatttgtgcctctttcccaaggagaatatggatgagcaaagtagatctgacatcctttgattttggtcatatccgcaaactcagaaccattgtcaaacgtaattgatttaaaccaattaggatgtctgtcaatctccttttgaagcagtctttgacaagtactggcccgatagtcaggaattttgataacaacctcaaaacgagtggttctttcagtcagtgtcattaaggcaggttgatttttacgtctgacgcctttaaccaaatcgccttcccagtgcaggggaacttttctgttttcaacttctttaggccgctgttcaatcgaattgccaagattctttttatgcggagcatggccaccatgactatgatggcgtttgtttctgcgtcttttaagcttcattggcaggtcgatattgcttatatccagcaatccttgatcaatataacgatagacagtgggcgtgctaggacatggataatttggcataatcctgtgaaattcaccaacgaattcatcaatgctagtggcatcaaatttggctttaaagcgtctgcttagcattctgaaaaaaacggcatagtgttgcagtggattacacttatagcagtttctgcggcgcttttcatgataaatttgtgcagtatcagcgtaatagtgctcatacaagacatagctgctgtctctttgcaggacactgcctcgtctaatttcacggctgatagttgatttatgacagcctacttcttgagcgatagcagtgcaggaggttatgccagaatcaagcagagcttgaatttgtccacgttgttcgctgttcaattgatgataatgcttggaaatgctagaatttgagttggtcatgaagatcttcctttcttgatttttggtcacttcaagtttaggtcttcatggcctttttgtttaacaattagtgttgcacttcaattttaaatccgggtaacttatttgattaattttttgctcttataacaataatataaaaatgaattatctgctccatttcctactcgcagtgcgaaactgtcaaatcttttgtgtaaatagttctttctcgtaaattgattttttaattatttatttaatcaaagtaggattctaaggtgtcctgaacctgaccaaagcctttatgaattcggttgaaatagcggtcattgtagctcattgcctggatgccaataaatacatcaagcgactgttcagttggaaattctgccttaggcttagctttacgcttgatgacgttgttaaaggattcaatcatgttggttgaataaattgaagctctgatttgtttgggataattgtagaagaccagcagatcgggctcaatttccctcaaacctttgataacatggctataagctttattccattttgcataaaattcatgcaagacagctgcagcttctttttggcttgtctgttgatgtatctgcttgaattcgttcatgatcttttcgcggtcatccacccggactttagcacagatattgcgcatgacatgaaccaagcagcgttgaaaatgagctttaggataagtcctggtcaaggccgctttcatgccaacaacaccatcagaaagaaagagctcaacttgcttcaagcctctggacttcatgttttgaagcatctctgtccagacttcaatgttctcactaggcgcaatgcagtagtcaatgacttctttatgtccattaggtttaatgccaatggcaatatagactgcttcacgctcaaacgtttctcggcgcaaaggaaggtatgtcgcatccaaatagacacagaaaaacttgtcgcttagcttgcgcttgtgataagcctcaaccttggggagcatctgcttggaaatatttgatacttgggctggactataatgactgccatacattttctcaatcaagtcagcgatttctctggtagttacgcctttggagtagagcttgataatcgtgctttccaaaacatcagagtgctgcttgtagtcaggcagcgtgtgctgatgaaactggccgttgcgatctcgaggcacttgcacttcaattggtccaaactgggtatcaaccttgcggaaataagcaccatttctagaattgccagtattccagccatttctggcatagggatcatagcccagaaaggcagtcaattcagcttctagcaagttattaacagcctgttgtagctctttgcgcaataaatcgtttattttgtctggattgaatagagcttgtgctatatttttggtaaaatcattcatgaaggagttcttctttctgtatgtgtttttttgttcaaaccaatcatacgagaaaggaactcctttttctaatgtttaaagaaataaatttaaggaattattcatccttacacaaactattttacagtctccgcagtgcatctactttatcattattacttttatcttttttctttatagcaacataagtgtgtcctgaatcagctctatcactagaaagccaaccattggcagcaaaacctgctgttttataaaatttaaaatcagtagcttcgtattgagaggtaccaactttttgagctaatttataccccgactttttatcagttttagctaattttttagtccacttaatcgcttgattactgctcaacattttatataatttgattttattaaatgtatgcgttgtaattttaagcttctttattttgccttcttgcttatagtaccatgttccgcgagtttcctttggtgtagtaaataaattcttagctccccaggatgcagcatctactctattttgacccattacaataatagctaacatgaatagcgcagttgtcataaatataatgagcttatttttcaagtttatcacctttccttatataactcctattttcattatttcattaaaatatttcataaaagttaaaggggatgacagttcttttacttcttacttacaaacgtaaaaaatcaattacattagctttaccaaaaaaacgtatgcaataaagccatcttaattagacctggcatagcatacgtttttttattttattttttaattatattaattaattttctcttgagtatgacttaacatctgcatcaatttcattaataaaatcagtaaggctcttagaaatttcttcgtcagtaccgtaacgacgtacgtttacgctaccgttcttcatttcttcgtcgcctaacaccaaagtgtaaggtaccttttgggtttgtgattcacgaatcttgtaacccatcttttcgttacgagtatcaacttctgctctgaagccacgcttagcaagttcttgacgaaccttttctgcatattcaccatgagcatcaaggttaactgggataattttaacttgaactggagcaagccaagttgggaatgcacccttgtaaatttcagtaaggtaagcaatgaatctttccatagtaccaacaataccacggtgaatcataactggacggtgttcttcaccatcttgaccaacgtaagttaagccaaatctttctggaagcatgaagtcaagttggatagttgacatagtttcgtcattacccaaagcagtcttagtttgaatatcaagcttaggaccgtagaatgctgcttcaccttcagcttcaacatagtcaaggccaaggtcatccatagcacccttaagcatcttttgacttctttcccacatttcgtcatttgcaaagtacttgtcagtattctttggatcacggtatgaaagtctgaagtagtaatcagtaatatcgaagtccttgtatacgtccatgattaacttcaaaatcttagcgaattcagtttgaacttgatccaaggcaacaaaagtgtggccatcattcaaagtcatttcacgtacacgttgaaggcctgacaaagcgcctgacttttcatatctgtgcatcataccaagttcagcaacacgaagtggcaagtcacggtatgaacgaatgtggtgcttataaatttgaatatgtgaaggacagttcattggacgaagttcaagcatttcgccatcacccatgtccattggtgggaacatgtcatcacggtagtgtgcccagtgacctgaagtcttgtaagcatcaaggttcattaatactggagtataaacgtgttgataaccgtcagcaacttcacggtcgataatgtaacgttcaacaacacgacgaatagtagcaccctttggcatccagtaaggaagaccagcaccaaccttaggatcaacgaagaagaagtcaaggtcacgaccgatagttctgtggtcgcgttccttaatttctgcacgacgcttcaaatcttcctttaaagcagcttccttgaagaaagcagtaccgaagattctttgaagcattgggttggatgatttaccaagccagtaagcaccagcaactgacaaaagcttgaagtgcttaatcttaccagtgtttggcaataaagcatcaaagccaaagtcaacgaaatcacctaacttgtaagcatcaaccttgtcagcatcaattttcttcaaaagatcagtcttgtaagggtcatccttgaaaatatcttcaagttctgacttgtccattacaacatgttcaattgcttgaccactcttaactaatttttccatagccttttcaagttctggcaattcagtaaccttaatttggtcatctttgtcagtatctacgtaaaagccgccttcatcagcaacatgttgacccaaacgaagttctgggtacttgttcttagcaactgcttcaagtgcaaaagcagcagtagctcttaaaatgtctaagccttcttcatccttgtcagtaagaatagcaacttcaacatcattgtcaatttcataatcaagtggcttaacaacgccatttactttagcaccaacggcagcttttccaagagatgtagcgattgatgaagctacttccttaactgaaacagccttatcaaaatctttctttgaaccgtctggcaaagtaattgaaaaactcatatttttacctccaataaaaaaatcccagtgctaataaaagcactgggacgtgttaattgcgtggttccacccaaaattcaggttagcgtacgtctaacctctcgtatagattgataaaggtatccagcctcttaaaattcaattttgggaataaacaattggggtgattttctaatgaagaacttccagaactaggtccttctctctgagccgaacatcatcatgtctcgtttaattaacttcaattatacgcatcaaagtgaacgatgcaagaactttttgaaattaatgcgaaaaatttcgtcgatcgggaccggaaactactacttctttagctaaaaaacgtactcgttgcattaatcttttagctttaactggatcagttgcattacgggtttcctcaaagtgtgactctaatgcttccatatctaaattagaagagaaaaaggttggcaaaacattatccattcttgcctgtaaaattactcctaaaacgtcatcacgtgaccactgacttaatgtttctgccccaatgtcatccaaaattaagacatcgcattcagctaaattcctgatctcatcttgcaagctgttatcaccaaaatgacttgataaacctgcaataaaagttggaacatgtaaaaatacaacattccgatcaaaattagttgctacatagtttgcaagtcccgctagcatataggtcttcccgatcccaaagtcgcccgacaaataaaggccttgttggtgaggatcagctttgtactttttcaaaaaatcataaatcagggttaaagcttgctggcgatcatttgtaacctcaatatcacttaaattaacatcatgcaatttagcaggcagatcaattaaatgaagacgccgcttggctgctcgttgctgatctgctacaatcttagcctcggtaggtttataacgtacatcaattactttgccgtttaaaaataattgcggagcataaccggccagcacctgattctgactatgtttttgcgcataatattcatagatattggccatactatttcgaatcatcgccttatctattttttccctatttgcctgcaaaaacgcttgcacatctggatcgtgtaaagcagttttcaacagttctttctcattacctaaattacgctctttaactatttttttaagcaaatcaccaattgcttccattatttcacctaccctctatttacttatttttcagatccttaaagatatccttcagctgttctgttgacataccttcatttttagcctttttcttgctccaatcggtacctttttcgactcgcttattttgtcgatatgactgtcgatttttctttttaagaatatcggctttacgcttcttcacatattcaagagcttgtaccccagtactaataccaccttgcagccaatcattagctattcgataagcacgattagaagttacaacagtatcgtaggtcaaacaggtatgaatcaaaatattaatcaaatcttccggcaagccatactgcgtgtgcagctgattaataatatagttttcgcctggagctacaattccacccttttcagtttttaatttgtataaaaattcagatggggaattttcattagcttcgagtaacagttttctatcattagcatccaaacctttgatagtcgcaatagcgcgctttttgccttcttcaatttgtttttgaatgttttccctagtatgcaatcgtttataattttctgctatggtattactaatttcatgcatgtttaatttatgtgtaccatgcaaacagggaacagtctcatccacaaattcctgttccgataaattatatgtctgtattaagccccgaatttggttctttttaatttctacttcttgagctggaatttgatagacattatattgatctttaatcagatcccaatcaattggatcctgggcattaatttcagcagtttctatctcaggcgctttattttcctgcgcagcttctactacctcattagatggattaattgcttcatcccctggcaagcgaaaaacatcaaaaaagttggctgagacatcgcgcgcattcttgattggcttttcacgcagttttgcttccttagcaaaagcatgactcaagtcatgaaaggttgggctgccaactttttctttcaacaaacttgctagcagtggtgttgcaaaaaatttgtctgcactaggaacctgtaataacttaaaaacaatgatattattgaagacattatccgctaaaaaagtttgcactaaacctacggcttccagtttatgcaaagaatgaaacatatcttttaaactacaatcaagttgctcctgtagtgaataaattccctttgaatcagaaacaataccatatggatcatagtcattgatcaaagtctgatacaaggcaattgccaccgcgccaaccaaaggctgatacagtttaatcaagattttctcattctctggaaaaagggtaatcttgttggctacataataaagatgcttaggatcagacgttgcgaacatgactaattaccctttccttttttggccatcatatcttccattgtcttcataaagctagacatatccttgaactcacggtaaattgaagcaaagcgaatataagctacgtcatccaaattagccaaatcatccatgacatactgaccaatcttcttagatgaaatttcactaacgccttgttttcttatcttattttcgacacgatcaaccaattgctcaaattgttcactactgattggccgtttttgtccggctgccattactccgtgcaaaattttctttcgactgaatggttcacgagtaccatcattttttactaccaacaaaggagcagtttccactcgttcaaaagtagtaaagcgaaaaccacaattttcacattctctgcgccgtctaatagcccggttttcatcactaggccgcgaatcaataacgcgagaagcattttgatgacaatttggacattccatagctatccctcttctctaatctttaccaataattgtgctagtttattctctagttcttttattgtaccagtattttcaatcacaaaatcagccaattgctcttttttgaccataggcaactgactttgcatccgaattcttgcttcttcatcggttaaatgattccgctccttcaaacgctgtaattgcattttctcaggcaaagtaatcactaaaacaccgtcagctatatctttcttatccatccctgactcaaaataaagtgggacatcaagaataactattggttgagcttgatattgatttagcaatttctttgtttgcaaaaaaatcaacggatgcgttaactcatttaatttagttaaagcccgcgaatccttaaataccaattgccctaatttctttcgattaatcgtttggtcatcatttaaatactctgagccaaaataatctttaatcgcctgccaagaagcttgcccaggctccatcaaatcatgagcaatctgatcatcatcgatcacaggaattttatttgctttaaaaaactggtccgctgtacttttcccagttgcaataccaccagttaaggctaaaacatagctcattaataaaccacctgacaatgtggacagaaggttgtccctctgcctgatactttaatcttttctagttccgtgccacactttgcacaaggttcacctgcatgaccataaaccttgagcatttcttgatagccaccaacatttccgttggcatctaaataagtatgaacagtcgtcccacgcttttttgttgcaattttaatagtttggttaatattctgccacagctcttttgctttttctgctggaattttatttgcggcactcaaaggatgaattccactctgccacagtgtctcatcaacatagatattacctaaacctgcaacggttgtttgatcaagcaagacatttttaatatttttcttcttacggctcaaggccttgataaaataatctgacgaaaattctatgctattaggctcagggcccagtttgccaatccccgtcacttggcgctcagtacctgttaaaatcagctgcatgcggccaaacttacgcacgtcattataacgcaaggcagtttgatcagtaaaaataaactctacgtggtcatgcttatccttaggcgcatcgggagtggttaaatgatattttccctccatgcgtaaatgtgacacaatagttaaattatcacttaggcgtatcagtaaatatttagcatagcgatcaatctttaagacccttttacctggtagttctttgataaatttcttatggtctgttgccacaattttgggataccaaagtactacttttttaatcgtttttccaacgattagcggagttaaagtccgtcgcaccgtctcgacttcaggcatttctggcattaaatcacctactttgcatcataccaattatgaccccaaccagaatctgcaatcaatggcacatcaagcttcactgctgattgcataacttctggaactatcttcttaatcgtttctaattcatcttttggcacatcaaaaatcaattcgtcatgtacttgaacgaccatcttggtcttcaaatgtagttcatctagcttcttttgcatattgatcatagcaatcttgataatatcggccgctgatccttgaataggcgagttaatcgcagttctttcagcaaaagaacgaactgtaaatttcttagcatgaatatcaggcaagtagcgtcttctgtgcataattgtttctgcatagcccttttcacgagccgtttgcacagccttatccatatattcacgaatttgtggatattgttcaaagtaattgtcaataaactcttgagcacgttttctagaaatacctaaattctttgataaaccataatcagaaataccataaacaataccgaagttaacggctttagcatgacgcctcatcaatggcgttacttcatccggtgaatctaaatgaaaaattctcattgctgtatgtgagtgaatatcatagcctgtcttaaaggcttcttgcatattctgatcaccggaaacatgtgctaatacccgcaactcaacttgggaataatcacaagagaagatgtaaccatcaggattggttggcacaaaggcttttctgatttgctttccttcttcagttcgtgtaggaatattctgcaagttaggatcaacactagaaagtcgaccagttgctgtcaatgtctgtagataacgcgtatgtacgcgaccatctggctgaatcacatcaagcaagcccttgacataagttgattgaatcttagcaatttgccgataatctaaaatttcactaacaatcggactttgtgtctttaattggtctaatacctcaacagaagtggaataaccggtcttggtctttttaattactggtaaattcaatttttcaaacaaaatatgacctaattgcttaggtgaattcaagttaaagcgctcgcctgcttgttgatagatcttatcctccagctcttttaaccgaacagcaaattcattttgcagttcgagcagagtacttgcctccactttcattccgttgatttccatccgggctaatacacgagcagtcggaatttcgattgtatcaaacaagtcatcttgttcgtgttccttaagcttctcaagtagtggctgcttcaagttttcgatagcattaacctttgaagccaaatgattaaatagttcttcatcgtcatcaggaacatgctcacttttgccttttccatagatttctatatcggttttaactgaataatcaccatacaagtgagcaatttcacctagatcattggaattattttcattattgatcaaatatgaagctaacaacatatcataatcttgaccgtgaacatggatacctaatcgatgtaagccaaccattgtccgctttaaatcaaagacatttttcttaatttgctcatcttctaataaatgtcgcaaattagtctcttgtaaaagttcaacatctcgtgaaacgtaaatttgataattgatttttaaagcaaaaccgacaaatggagcaaggtgatagttagcacctagcatagcaagataaaattcaatttggtcatctgcattagctttgattttcttgacattttggtcatcaagaactgtgtattcaactttttctacttcagttgcatcttggccttgaccgctagcattcagttctgccaagaacttacggaaattcatcttttcatagaattggcgtaatttttcataatcaattggttggcgcttaacgtcatcaatatcaattgtcacgggagaatgacgatcaattgtagccagttttttgcctaaaatagcattgtgtttatcgcgaatcaaacgttcttttcgtttagaagctttcaagtcatcaatatgatcatacagattttcaactgtatgatatttttggatcaagttagaagctgttttaggaccaatcccctcaacgcctggataattatccgatgaatctcccattaaagccttcatatcaatgaattcagttggcgttacaccatttacttccttcatatgttcaggagtataagcctcaagctgtgatacacctgacttagtcacttcaaccgttgtcttgtctgaagccaactgcgtcaagtcacggtctcctgttacaattgtagtaataaaaccattttcttcgcccttagtagcaaaagtaccaataatatcatcggcttcataatcttttaattcataagtcttaataccaagatcatgtagcatctcttgaatatacggcatttgttctaacaactcttctggcgtcttagcccgaccacccttgtagtcaccgtacattttagttctaaaagttactttgcccacatcaaaagccaccaacacatgagtcggatcgacatcttttaagagtacatcgagcatatttttaaaagcataaatggcattagtatgcaaaccatctgggctcttgaatgattctagttggcggtaaagtgcatagaaggctctaaaagctacggagttaccatcgattagaagtaattttttatcagccattttatctcccttttaacaaatagatctattcttttacttatctattttaccagttttcatactaatctttcagcatgttgttttagtaaaatagtgaatctctgttaattacgatttttactcaaaaatttaattaaattctttgtcaaaaaaggattttatcaatcagtaatcaaaacaaaaaagcacgtaagtgcttttccatattattcagcgtcatcctgactgccagattcatcccatactttctttaaagctggaacctttcctaaatctgtcatctcatcttttccaacaacaatcaagttgttcggaccttgtgctaattgattgaagctgtctaagctttgatttctgaagtagccttccccagctttagctaaagcatcctgcatcttttatacacggtatgcatcagcatcggcttgtgttttaacagcttcagcgttagctttagcagttgcaaccaaagcatcattcttggccttagtggtcatttcaatcgttcttgcttcaccttcagctttggcaatagcagcggtcttctcacgatcagcagtcaattgtttgtccattgctctttgaatttctggacttggtaaaagttcatcaacgtttactctgacaaccttaattccgtaaatatcagttagatctccagttgctgtaaacaattgatcattgatttccttagttgaacctaaagccgcattcaaatccattcgaccaatgatgtcacgcaagtgaccacgaattaattgcaccattgactcaactgaatcggtgttgttgtagaagtagcggtatgaatcagtaactaagtagttcagagtcaaggaagtagtaatctctgcattatccttagtaataattgaatactttgaaatttctaatggctgcaatgccaatggaactttccgaattcgttgaaataatggccaaacaaagacaaagccagccttaacagttttagaatatttacccaacgtttcaactaagccttcattattttggggtacaattctaaaaccacaacaaatatatgcaataactaaaactaaaacgattagcgtaataacaatacccatttttatacctcaactaaaaattactcgtccttcttcttgggatcgactcccttggctaattcacctagtgaactatcggtctgctctgccaagcggttaagcttttcatcaagtagatgagcatactcatacttgttcatgtagtccaagttggcccaagcattaggaatctcaactctaaaaggaataccattacgtaaaataatttgatcataaaacatattaattgcagtagctgaattcaaacctaattgctttaaaattgcttctgctttttctttcttttcaggattcattctgacataaagtccagttgttttctcagccatggtaccctctcctttctatttaccactattatatatcgtttgcatataaattgcatagcttttttacaaaaataaaaagactaccttttgcagtagtctcaagaatctaattttagcctaaatcactaatgtggaaaatttgattctccaaagttcttaacttaaactcgccatctttgacatatttttggtggtaagccacagttagataaatgtcatctggcgcctgaacatgaatactttctacttcactgtagcgatcaggcaaatcaataccatcaatcattgctacttgccagttctctggattagtttcaccccatggaaacttaacgatcttacgtgaccaagtagtaacttcaccattcgcatgatcaatcttgggtgacaattggttagaaatataaatattcttgtcatcatcaatggcgtagccctgaacagaatcaatcatttgtggagcttcttcacttggtgccacgcttggatgatcaaagttatcaatgtgaaaagcactaaggcaatgcaaatcagtaattggcgtgttcttagtgccattttcattcaacttttggtttacttcatttaagtcaaacaaaccaaagtgacctgaaccatcatcccaaattgaagcaatcatgaagtacttgccatttggtgaaactgaagcttctactctgtgcaagtgatcatgaccatcataaggaacgtcggttacgtgattcaagtgtgacaaacgtggaagttgtgtatttgaagtatatctttctggtaaaagtcttgggtactttactcgtgcaatttgagtagtccagttgcctgaatttggtttagcacctacgaaatattcatccttgtcattagctgctacccaggtttgcgtgtggccaaagcccatcattactaagtgtggatcagtataatcgatgttcttagttaaaccttcatgttttctataaaccaacacatcatgtgcactgtgaagaagttgcaaggcaaaaacatgatcaccatttactacaccaacttgggctacaacatggtgcatcccattcaagcgataaaacaaatgaggtgtaatacttttaaccattcttatttatcttctttctttatatctattcattttcacttatacataaattatatcctatcatcaaaaaatagattgactttatgctgataacttccaataattagaataaatttttcttggagggaaaattatgaaaagaagaacaacacttttattgtcgagtgcagtaaccattgcggcattatttagcttcaactcaaaagttcaagctgcggctgatcctacgatcaaggcaacaaattacaacatgatcgtgaagttggacactcgcaagaatcaattaacagaaaaagttaccatgcacgttgttaataacggtaatgaacctgttaaaaatttattggttagaaatattgctagcggcgtgttgaaatacgaccacaagcattttgaggctacaagaaatgcgacaacttcagttaaaagcatttcatcagatggtcaaaagctttcttacactaccggtaaagacaagagcaatttatttgttaacaaaagtctaaatataggtgaatctactgatttaactgtcaacgtagttaccggcgtgcctaagagacaagatcgttttggctaccaaaatatcaacggcggtaaggtttataacctgtcattctgtttcccatacttaagcgattatcgcaacggtaagtggaattatcacccatactacgatgctggtgaaaaccgcaacagtgctgtaagcaatttccacgttagcttcttcgcaccaaagagctacaaagttgccgcttctggtcaaagcacaaccaaaaatggcaaaactacaattaccgccaacaacatgcgtgagttcgcaatcgctacttccaacaagttcaagattgaccacgcttatgcaaacggcgtaagaatcaacgactactaccttgcaagcaaaaacagcaagcaatacaacaagcttgctttgatgactgcccaagacagttttcacatttttaccaaaaagatcggcaaatatccttacaaagaaatcgatattactgaaggcttgcttagcaaagataccggtgggatggaatatcctggcttgatcatgatcgatgccagcggctttttactaaagaagcacccacttgatagatataatgaattaactgaagatgtttctcacgaagttggtcaccaatggttctacggcactgtcggcagcgacgaatacatggaaccttggcttgacgaaggtcttaccaacatccttgaaaatggcgtttacgatttgacctacactaagagtaaggcttactgtgctaaactgatgcacagcaagttctatactcgtaagaacgtcaagcgtgctaacaaaatcttaaaagaaaatgctaaccaattcattaataagaatcaaaaggccaactacatcaactaccctgttaataatccaccaaagggcgttgacactgaagacatggcttacgaacttgggatggacttccctgctgttttaaaggttgccatgggcgaaaacaagttcttcgatgctttacacgattactatcaaacttactgcttgaagcaagcaactgcacaagacttcttgaacattatccgcaagtacaataattcaaagaaggttaacaacgtgatcaataaatttattgatcctaagtacttaagtgaataaaatcaaataaccccgaaaacgtttgagtttcgaggttatttttatagtctcataagtgctaaaatcaacttaagggattattacaaaggagacaaaatatgactactaaaaaattagcaactatcgcagcagctttattaatcagtgttgcaccagcagctgctattatcaatcaacctgttcacacagttcaagcagctacgcaatcacaaaaaggtaaagttactctcaagaaatcctttaacggcacagttcaagtcttcaacagcaaaggcaatgccactaccactacccaaaaagtcaatggcaagaagatgactgttgcttcaacgattaaatcaggctcaagttttaaatattatggcaagcctatcctgatccaaggtaaaaaagtagatgcaaaaacttctaagaactaccactacactaccgcttcttacgttaacatcggtaaaaaacgctacatcaaatctttgaatgttagctcaatggatggacaaaatgttttaatcttgagttccaactctcgcatttatgataaaaacggtcaccgcactactttcaatggtttgtcactcatccctaaatatatgttagttaaaacaccagctaaaacccacgccacaactaagaatgacgtattttactacttctcaaatcttagcgggtctaaaaagagaagtttgaacacaaccactatcaagggtaagccattctacgccttaggtaatggcgcttatatctatgcttcaaatgttggctttgtcaacggcaacaccctttaccaagcttctggcaccactaccgccactattttaaacaaaatccatgttttgaataataagcttaaatcaaccagcaagttgctcaagattggtcaaaaagttaaggtagatgccaccaagaccactggtgaaggtgatgaagctggcctttacttcagaattgctggcaccaaaggtaaaaacgcacaatacatttactggggcgacgatgccgaatatggtatggatcaagaaagcactactgatgaatttcaaggtaactttaatttagataatcacctcgcaaattaacacaatatgctaaaattaaataaatgatataacgtagcgacctagaatagtgaggtttacctcaaagtatctttctaggtcgcttttttcaatgtggggggaaaatttatggatgaattatttgctaaagcgccgattaaaaggtctactttaagctagcattaccggtcgtcttagggatgatcactaccatgatctacaacttggcagacacgatgtttgttgccaaaacgggtgatacaaatctagtagcaggaattacgattggtgctccactttttacttttttaatcgctgtttctgacatttttgggctcggtggatcttcactaatttcacggctattcggtgaaagaaattatcaattaagtaaacgtgtaagcagtttttgtatgatcggtggatttgttactggtttaatactaacagccattttactaattttagaaaatccgatccttcatcttttaggagcaaaagctgccacctatcaagatgctgccgatttttatcgtgtaatatcaattggtgctgcgccaattatcttctcaatcattccgcagaacttaatcagaacagaaggtttagctacccaagcaatggttgctacaatgacgggaaccattttagctatcatccttgatcctattttcttgtttgttttcaaaataggtgcaatcggtgttgggattgccaacgttacaggttatctagtcactgatgctattctcatttactacgttttatacaaaactgactacatcaaattaaagctaaaatatagcaaaattagcggcaaaacaatcaaagatatcgtagcaatcggcatccccggttcaatcaccaacttcgctcaaagctctggcatggcacttcttaactcatctttagctctatacggtgcaaacaaagttgccgcaatgggaatcacccaaaagatttacagtatcgttatcttggtaatcgttggttttgcctttggttcacaacctttaattggttacaactatggtgctaaaaactggaaacgattaaagaaaattctaaacttcgatattcttgtgcaagttgtttatgctgtaatttcaggcggattattaattttatttgctcgtccagtcaccgctctatttatgaatcaaccagatatcgttaacgctggtaattatatgttaattgccactattattaccacaacaatcgttggtatcattttagtttacactaccgtcttccaatcagttggtaatgcatgggcagcgtttatcatggccatcgttcgccaaggcgttgtctactttatcgcattagaaattctaaaagtcacatttggctaccacggtatcgtttgggctcaagcagccagtgatatcatcacctgcatcatcggttactttatttatgaaaagagcctggatctcaaggataaaatcaaagattagccaaaataaaaactgctctcttattgagaacagtttttttcatgcttatctttcaattaaagcaatttttcaaaagcatcttcatacttaggaatatcacctgcacccataaagacaatgactgaattcttattcttagtcaagtcagcaatattgtctaagtcaattacttctgagccaggaatattcttaaccaagtcttcacttgaaatatcaccgttagcttcacgagctgaagcatagattggagttacgtaagctttatcaacgtcacgcaagatttcttcgaagtctttttgatacttcttagttcttgagaaagtgtgtggttggaacacaacaaccaacttcttgtctgggaacttttggcgagcagcttggatagtggcgcgcatttcagttgggtggtgtgcatagtcgtcgatgacggcaatgtcgccgaagtccttttcactaaatctacgcttagcacccttgaatgatggcaagcccttcttgatgtcttccattggcaccttttcggtgtaagcaacggccacaacagcagtggcgttcaaaattgagtggtcaccaaagaggtgaatctcgaattcgcccaagtccttaccgtgagccaaaacgtggaacttagaaccagtagtcgacttctcaatttgagtagcttgaaagtcatcagtatcattaaagccataagtgtacttaggaatatcggtcttcaaactttgcaaacgcttgtcatcaccccagacgaacaaggccttcttagtttgatcagcagctgattgaaaagcgctggtgtaatcggcttgatccttgaagtagtctgggtggtcaaagtcgatgttagtcatgatttggtaatctggatgatatgccaaaaagtgacgacgatattcatcggcttcatatacaaagaaacgtgaaccagcaacgcctttaccacgaccatcaccgattaagtatgaggtcggagcgacttcaccgagcacatgggctagcaaactagtagttgaagtcttgccgtgcgtaccagaaacaccgattgaagtatgactttgaacaacttcttcaacagtatctgggtaagactgccacttaacatctttgtctaagcaagccttaacttctgggttatcttccttgaaggcatttcctttaacaattacttgctcagcattgctcttgatattagctggatcaaaattcttaacttcaattccaacctttttaagtggaacttgggtgaaagtgtatttctcgatgtcactgccggcaacattatagcctaagtcatgtaaaagcagtgccagggatgccattccagtacccttgattccaataaaccaaatttgcttatttttatctaacattatttgtccctcgaaatttcaacgtttttattcgttaattattttaccatttttcttatgctaaaatttttaaaatcaaaagaaatctatgatgaaaacgacaattatgttaatactgtcgatcatttgatcattaaagaccttacgggtaaaactatttcccacaaaattggttcactagctccttaaaaggtgaaactggtggcttttcttagacaaaataaaaaagttgatcaattagcttttttgcaccaactggttaactttttatttttgctttattcaaattataaagtaatttcaccactagcaatcaattcatcacacttagttggttcaaattctgcaccaacttcgaagctatcaggaacaaccatgatcccgcgcttttgtggtgcgtgtggcaaacctaattcacgagctgaacaaatcatgccgtatgaatcaacaccgcgcaattcacctggccaaatttgtgcaccatttggcattaaagtacctggaagtgcaacaactactttttgaccttgagcgatatttggtgcaccacaaacgatttggtgttcttcaccatcagcaacctcaacagtagttacgtgcaagtgatctgaatcagggtgtggttcacaagtcttaacgtagccataaactaaagttggcttgccatatgctaacttgtcagtaaaaccaacttcatcaagcttcttgttcagtgcaacaagctcatcgtctgacaacttaactggaccatttggtaacttatcaaagtcaactaacttatcaacgttgaagaagttgtaaccaatggtcttgccttcatcgttagttacgcgagtaacgtcttctttttcctcaaatgagctacggccttcatcgtgacctaagataacgatcaaagtgttaggataagcttctttattagtactagtaatcatgcttttttttctcctctattagtcaagtgatcgtaaaaagttttccacttcatctttagttttacggtccttatttactagtctaccaatttctttgccatcttggtagacaacaaatgaaggaattcccataatcattaatttttttgctatgtcaattgaaccgtcgcggtcaatttcgtagaattttgcatcagaaaaatctttttcaatttcaggcataaatggagcaagaaacttgcagtctgggcaccaatcagctgagaattcaagcacagtacgtccttctttagtaatttcctttaattgatcttcagttaattctttaatcttttccatttttcatacctcatgtatttcttactttttataagttgatattattataaccattctttaactaaaaagctagaaattgagtcttacaattatttcttttctttaaatagataactgccccaacgaactggtttttcaacagttggcaaaaccatgaagtaaagtaaaaacaaatacccaaatggaataaccgagatccagtaccaccaaccggtgtggtcagtatcatgcaatcttcttatggtaaagccaagtaagcctaataagatccaaataatcagtagatagataattatttgaataataagtgtaccagttgaaacgtgcgttaataagaagaattcattacttgaataagcaatgccatcaattgaatatgccgtagctgaacatgctgctaaaatgactagcaaaataattgcccaaacataggcataccaaaatccacgacgagtactacgtgcattctacttaaatggtgcagtaaacaaaagtttgaatgcttgtccaaaagttggtctaggaatatcagttttaggttcgtgatattcttgttcataataaggtttatcttccataattttccctccaataatctgaaatcttacagttctattctaaaacaaaataactaaagcgatgagctagtagcaagattttatccaataaagcattaaaaaacgcctagagtttatctgctgtaactctagacgcttcaaactattcatcctcaaaatgagcgtgcaaagcataaattggattacccttagctgcaaatttatgctcgtattctgtttcaatattcttttccacaatctctggcttttcatgatgaagatcaactgaaacaaaatcaaacttcattccataattattcaagctctgaacagagtaagcatacaagcccgcattgtcggttttaaattcaatatgtccttctggcttcagaacttgttcatacttgctcaaaaaactcttgtaagtcaaacgacgcttttcatgacgagtctttggccatggatcgctaaaattcaagtagataacattggtgctatttgctggaaagaagcagttgatgtcagccgcatccccgcgtaagatttgtaaattatccaagcccttttccaactttgttcgcaagataatccccgcagccgtagtttgcaattctaatgcaacataatttttatcaggattttgttcagctaacgtagtaatgaaatgccccttaccagaacctacttcaatttcgatgggatgatcattaccaaatcgttcagtccagtcgatctttttttcaggatcaggattttgcaaaacactttctggatggtcgtttacaagcttaacagcccaaggtttatttcttaatctcattctctattcctatctaattccaaaatttttttgattcatttttttaactctgcctggcaagtaagtggcagttacaatcatagtgaaaccaagtaaaattgccatcgcttcaaacaagttaacattaattggtagcacaattaaccagcagacactaatcaagagccattgaataaacaagcccattgtcaacacctctaccaagtccctgccacgattttgccgttcaattgggtaaacgcggtacatgaagttgcggtcaaactctgttgccattggcaataattgatagaccgttaaaaagattaccaagcatgaaaggcctagtgcccaacgccaatcttgcactaaccacgataccaagattgcaaagacagtcattctgactaataagttcaagtattctggattacgcaaaagtgatctccgatacaagaacaaattaggattttccttagccaatgattttggtaaaagaaagtcgaggtatcttctgcgtttgattgtaacttgcttttctgccacatcggtaaacatactgaagattgaataaacgcgatcttttctagcttgttcagttttaatcgcatagcgccagttaaagacgcccttttcttttttagtaccaaaatgcgtaattaccattaatactacaacttcaattggataaataaatgatcctagtgagccaatcaacaaagccgccagagttaccactaataatatccattgcggataattgtagtagaagtacaaactctctttttcaatcagcaacatacacaattttaataaaacagtgctgataatcaggattacatatgaccaaactgggattccagcctttaccgtcgcaaacggaaacagaattccgccaagcaaaacaatcagaattgttggcagcaccatactgtaacgaatcatcggcttcagatattcacccatttgttcatcttgcgtaaacagaaattgcatgtcggcctcttttaataaggtaactaatcgaccagctaataatggcaaccacatgataaagccgacaagtggcttatagaaccacagattattgggaattacgcgcatagcttgggcataccagaacatcagcgccccaaacaaaaagatcaacgctaaaataaagaagtcattaaacaccagcgtcaaatattttactgattgtttaagattctcgctcaaccttctattcgctaactcacgcattgccattatcctctctattcaaagcaaggtataacttgtcaaaaggatcatctggcttaaggccatagtgctgacgaatttcttgcaaactccccacaacttcgatcgtgccgcggtttaacacagcataattcgaaatcgcttgctgtgcatcagctaaaacgtgagtagtcattaagaccatctttttgtcagcaattgctttttttattaaatcgattaagttagcaactgccaaaggatcaaggccagtaaatggttcatcaattacaagcaaactagtatctgctaaaaaggcagagacaatcattactttttgccgcatccccttagagaagtgaatcggcagccattctagcttgtcatcaagtctgaacatcttaagcagctcatgtgcgcgtttccatgctttattttcatccaagtggtaactcaacatggttagctccaaatgttcctttaaagtcaattccggatacaaaatcggtgtttctggaatataagctacttcacgcttaaacttagttggttgctgcgtcaatacaacatcgttcaagctgatcttacccttttgcgggcgaagtaaacccaaaatatgtttaatcgtagttgacttccccgcgccgtttagcccaatcaagcctagtgcctcacccggcttaatttccaaattaatatctttaataaccgggacacccgtgtagcctcccgttaaatgttcaatttttaatgtcatttttcctatctttctttactgaatttatacctttattatgatagcatggatttaatagtaaactaaagtacaaggatatgaggttttattatggaaaatttagacaaagattgtttattctgcaaaattatccgcggtgaaattcctagctataccgtttttgaaaatgacgatgttaaggccttcttagatatttctcaagttaacccaggccacaccttaatggtgccaaaaaagcacatcgttaacttgtttgactgcaccaaggaagacgcacaacgctatttacaatatattcctgaaattgctaatgcaattaaggcagccttccctaatgttactgcaatgaacattactactaataatggtaaggccgcaaatcaagtagttatgcactcacacattcacttcattcctcgttttgaaggcgatggcttgaagctgatgacccgcaacaacgctgacaaatacgatgaagctaaatacaacgaagttgctaacaaaattaaggcacaattttagaggttaaaaatgaaacatttcttattaggcacagtttttggtgcaacagctgggctagttttttcctgtatgaaagatagcaatggtaatcgcccaggcaagccattaaaagatgagttcgaagcaattaaacatgaaagccaacgctttaattctgccttgcaaaaagctaaaaaggctagtcaagaattaaatgaacaaatgccaacagctgaacgtacaattagtgatattaatgatagtgttgaacattattccgaccatattcaacctatcgttaaccgcatagaaaaaaagagcgataaattgaaccaagatttggaaaacatcgtgccagatactaactcacaagacacaaagaactaagaaaaaataaagaaaatttgatttttctgtgaaaattcgtaatttgaaaacgaaacgcccttttttatggtatattaatgaacagttacttatttaaggatgtggagatattatttttatgaagagttatatgaaaaaaattgctgcagtcgtagctgtagctggcgttgcattatcaactgctgcttgttctaatagcggcactaaggctactgttgcttcctacaagggcggtaagattactcaacaacaatactacgatgaaatgaagaagtcacaagccggtaagtcaactttggctaatatgattatcaaccgcgctttggaacaacaatacggcaagtacgtatctcaaaagaaagtcgacaagcaatacaacaactacaagaagcaatacggctcacaatttagtgctgttttacaacaaaacggtatgactgcttcaagcttcaagcaaaacattaagactaaccttctttctgaacaagcattgaagcacattaagaaagttactaagaagcaagaacaacaagcttggaagagctaccaacctaaggtaactgttcaacacatcttggttgctaagaagtcaactgctcaaagcatcatcaagcaattgaaagatggcaagagcttcaaggttttagctaagaagtactcacttgatactgctactaagaacaaggctggtaagttgccatcattcgactcaactgacactactttagacagctcattcaagactgcagcattcaagcttaagactggtgaagttacttcaactccagttaagtcacaatctggttaccacgtaatcaagatgatcagccacccagctaagggtaagtttgctgatcacaagaaggctatcgatgaccaaatttacgcatcaatggctcaagaccaagctactatgaaagacgttattgctactgttttgaagaaggctgacgtttcaatcaaggatagcgacttgaaggatgtattatcatcatacgtttcaactactaagtaacaaatatatttagttaatcaaaaacgccgaatctgaatggattcgacgtttttttatttcattaatttatttttttaataggggcatcatattcccccccagtaaaaaaactatgccctcactggcaccttcctagtagcagctgagttggcataaataatactttgaaattcattatgaaaagcttgagcattatgcaatacagctttataatcatcatttttagcaggtccaactaatccgccacctacaccaacaacataggcaccactagcaaaccattcatgcatatttcctaatgatacaccaccacttggcattacattaacatatgggaaaggtccatgaatttcagaaataatgcctttaccagcaattgaacctgggaagattttgactacgtcagcaccataagttaaagcagattgaatttccgttggactaaagcaaccgggcatgtaaggaaccgcatacagattgcattccttagcagtattttcgttaaaagatgggctaacaacgaatctagctcctgaaacaatcgccattctagcagttgcctcatcaagcacagttccagctccaatgagtatccaagatttcggtcttggatatttttttactacaaatcaaaaggctcaagatgcttcatcattaaagcattcttgagctctttaattttatttatcagtagcataatcagacaacttcaagtagcgtacaagttcactcttgaaagtctttttattataagtcactaccgcaattttacctttataaaagccagcatattctttttgtaaatcaccatggatatcacaattagccaatgaaactacccaagacttttctgccttagttagtttattcatgtttttaacccaaactttttgtccgtctaatttactttgatcgtatttaatttgccaactagcctgcttaactgccgcaatagaagtattcttgttagtcaataacttttgtgcgttatcaacggccaaatcatatctttcttgctgtgctttttcagtcaaacgatataaagtcgattttttaatttgacctgctcgatcaactaaggcttgcaactcaccatagtcactagcagtggcctgacttgcatctgcttgtgcttcgctcggtgtattatcaacttttaatgcaactggattttgacttgtcacatcactagctttaacaaaagtatttgctgtatctttagtttggtgagcatatgagccgttgctggtaatcgtagtaccagtcttgcctgttccatcaagagctggaacccagaccaattttttgttagccgtaagatgataatatagatcagcttgtttagtttgcttgttccaaatataaagagctcgatcaacgccaacattaacatctggaatcaataaataactcttatcaacgatttcaccgtcaatattatagagatacgttgagttaccggcaatgacataattatcttcagtagatgcagctaatgcaaaattatttggcataatccgagttgactttttgatagcaggtaggttgacccacttatcagtacctttaatccgataatattccagactactcaaataatcatcagcgccgtcaacattatgataatagttctgatcaactgtaagcttagttcccttcttaattggagcagcaattggcatccctatttgattagttactggagcagtctttttggtaattaccttaatttccttagttgacagatccgcatattgatattttcctggcgagattctaccaatgttgcctggcttaatatatttatttttgccaatattaacaaagtctgtcttcttgatgcttactgtcggtaacgaaaaatacttgccagctaatacattattgaagaaatacctgctttgatttgggttagtaattgccttaggcttcaatatagtcacctttagtaactttcccttcttaatcttgctcttggtacgcttaccttgatgattgtaaacataggcattgtggttaatatagaacgttaatttagtagtttgtgtattatcttgacttgcggcaacaactggattagacaaatgattatttgctaaaacaggtacagtcaacattatcgtagctgccgatactaaaattaatttttttgatgctttcatttttattccctaccctaatttttataacatctttagcaattcaatgcatcaaaaaagtccaagaggaaatcaatgtatacctcttgaactttttatcaataaaaaaatagaaaggagacaagtctctaatctatccaaaaacatctctgcttttcaattgtataaacatgttattattcttcagctaatttgtcaataactttgttcaaaaaattattgacacaatttttcaccaaaacaaaataagcatccctgcaaatcaaccgcagtgatgcttatttcttattctaaatgttccatattgcctaatgctagaactaatattatttacaatttcagctcaacacctttaatcaactatcacattgccaatttaaatttggaaagccattgctctctttctgaccaagaataaacaggaatattatagttcttaaaggcagacttaaaatcactagaaacaggactattaatattgttcgcaataactgaaaattctgttttaggttggctttctcgtacatcaataattctaaataaagggttagctatattagaattaataggcgtattcaccaccttaatagcttgttgcggtttttttcttgtacgtccaaccacaatatcaaacttagaattccgtccgctttttcctagtaaactcaaatcttctcctactggaatattattatcaataaaataatttgttacatcttctttaaaatacttaataacactatttttagaagtctgtaataaatcaaaagcttgcaacatacattgagttaacctattttgtgcatctggaaattgggctaagtcatcaaattcaattactaattcattattctgatttttcacaccaaaattaatcaaaatcgattgaaagtagtccctacgtttagattttctgtttaaattaatatctaataaccctaactcattaatagtatacccatcatcactaattatatattttgatgtatttccttgtgcaatcactaattctatataatcattgtacatatctaaaaaaggtgtagtgatagtcatataatcctgatttttagaagggacaaattgaatctttttatctatccagtcaaaatatattttcttcattttctctacatcaaacatatttaactgttctcccccctttctttaaaataaactttcctgttctcgaaaattatatgaatttatattatcaacattcaaaaactttaatgtcttcttcaagcattcacacaagttatttaaatcattctgactcaattgaaaattttcattcttttccaaaagtggtacagctacatatgtaccatattttggaaaatccgctctatgcaaatgaggacaaggaatgactttatttgaccatttaaagtctccaacaggattttgatgaggacgtccaataatatctactctaactaatggctgttccttatttctcttttcccttaatagaaaagtacatttaggacgtctatgtccttttctattcaaatcaagtataaaattataattatttccttttaaccttaattgactagaattctgaaatagcggcaaatcaatgtaatcattcttttctattatttgtttaaccgcctcaatcattttagtaatttcagcaatatccatcctttttactcccctataaattagatttattatactatgaaattataataaaactctagttcaatttttcaacaaaataagcatccctgcaaatcaactgcagtgatgcttatttcttattctaaatgttttgcgttatctagcgctgaatcgtgcatcggtcgataatatcgcttgccatcttgactcagtagtggctcggtgaactcgcctttaggcgtatgctgcagggcattcgttactgcataaattgcagcatctaaatcatcaattcggtgcaataattccgcttctagcaatgccggcaatttgggtgaaccatattcaaagcggccatggtgactaagcaccatatgccgcaataagagtaaatcttccgactccagattcatcttcatatcctgagcggccagcataatttgttcatcaattaaaaccagatgcccaaccaaatttccttcagtcgtgtattgagttgcggcagaacctgaaagttccagtacttttcccatatcatgcaaaatacatcccgcataaagtagcgatctattcacttgctcataattatcagccaaacctttggcatccttaagcatcgataaagtatgaaaagctaaacctccgcggaccgcatggtggttgcttttaccagcaggatgatcataaaaacgatcatgccatttttgaagtaaatacttcacaatttttgtccaggtcggattatcaatctgcatcacaaatttattaatttcagcttccatctcattaactggttccggcgctgatttaataaattgatctaattcatagccttcttgtggaccgaccacgcgcagagaatagatcctaatctgagggcgaccctgatattcttctcttttgccattcaactcaacgattgtcccagttgaaaaagttgctgcatcttgattgttagcatcccagtaattaccgcgaatctcgcctgagccatcactgaattgcatcgctaaaaacaacttattctttttattatgacgcaactgtgagtttctaatcaaaacaacaatgtccatttcttctccatcgttgtaatctaacaatctcttaagcatcctgtgttcctttcgtaaaagttaatggctcaatcccaagctgatcaactaaattcttttgagctgtgaaaattaaaacttgattgttttcgctaatcttttgcaataactgatcgatatagctgactcgctgatcatcaaagtttacaaacgaatcatcaatcaagattggcaaattaatttcatccttgatctgctcaataaaagctaacttcaaggcaaagtataattgctcagcagtcccccgtgacaagtattttacttcgcgctttttaccatcacttctgactactgttagcttcttatctaaattaatcccaacatatctgccgcccgttagcaaagctaagtattcctgagccgccttaagcatcttggggaaccgttcattagatgccaagtcaagcgagcgactgatccaccttgccgcaaacaagttagccaagtattctttactgctctggacaaaattggtttctgtattagccagatcctgcttagccttaaacaccgcagtagaatcagctaaattgtctaactgcacttgcaactgagcaacttgactctgaagttcattaatttctgcattcttagtactaatttgttcagtcaaagccgttaatttatctgctaattcggttgaatttgtctgcatttgcagctgttgaagatcatcgcctaacgattccttcaaggccgcaatctgcgtcttcagtttagcctgattaagtgaatcttgataaagctgatcgtaacctgccatattttccacattagcttgggcaaaaagtgcctgtaatttcagacccaattctttcaaatcttgcttgtcctgctttagtgatgcagttaagctggattttctttgaagcaattcttgtttttcactaatttgtgtctcaagttcgtccaaaccgttcaaaacttgactaaagtcattatcaatcggttgcttcaatgcattttggacacttgaggccagttgagccacattctgattcaaaacagttacttgcttattattagtctgtgcggcattctttttgatttgatattggttcagattagttagtaagctatttaagtttagcgtatcaggattcaatccatattttgtttggaaagcttggcgtttttgagcaaccagcttttgcttttctaatactgccgcattttgcttattttggttactattttttaagtatcctgctgctaggaaaattagtccagtaattaatgcaattacaccaactgtacccaacgctaccaaaagaactacacctaatgccgctaacactgcaccgataacataccaaagcttgtcattagtagttacataagcaggctcattgacagcacctggcaaagcttgatagtctgcctgcatttgttcaatttgctctggtgtcaacttgagtagattttttaactcaggtgtcaaagctaatagttgctctttctcctgcttcaattggtcagccttttgcaaacaattacgatattccgcttgccactgcaagagttgaggcttctgctggattagcttcttctctagcgtaaaatcagactgatcgttttcacccaggccctgcaactgcgcttctaccgattgaatcgtcttttgcaaattacgtccctgagccataatatcttgggctttttgataattttgaccattaaagtcgacatccttgacctgtttttgcaaatcaagcagcgtctgataattgcccatttctttttgcaaatcatgcaaatcttgttcttgtttttgtaaaacagccagatcttgtttttgtctgtttaatgccgctcttttttgtacaaaatcttggtgcagctgttcataatcattaaactcatttttagtctgcgctaatttatcacgttgatcagtcatttccttaagcagacggtttacttcgggctttttacctgtctttttaaaaagcttacccgtttctttggcaaaatcgtcgcgcatttccagcaacttgctagaatctgctgctcccaagtaataaattcgctcaagcaaatcctcttgacttaaactgttaacctgacccagcatttcttggttaaaaataaaactatcagcgtaaaaagagccatcaatattttgaatttgatcaaaaaatacactctcaggtacaacttgaccatcttttttgacggttaaaattccctttttagtcttgtcacctttagcatagagtcgctcaagttcgtattcaccatcagctgcagtaaaaactaaattaccgcccatcggactaacatgagctagcggcgtataatcttcaaaaaacggtgaagagttacttctcaaatgaaagccaaataagatctgtttaataaaagctaccgttgtacttttaccagcttcattggcaccaaagaaaacattaatttgatcactaggcaaatcgaaggttttattcgagaactgcccaaagttaataatcttaatttgtttcagtctcatccttaattcctttcaatttactcattagttttacttctgttagattcttaaccgccgcaataaagtctggatcagccgctaatttagcagcttctggatcctttttttgccagtcactaacaatttgcttgaattcagctggtgcaaataactcttctttggcagcttggaaggcttgttggtcattgtcatttaactttaaactagtattcacaacaaagcgcacatcaactaactgagaagcaaatggcagcgattgagaaatagtttgccaaaaatcaagatcctgaactaaatcgcgttcttcggcactcaaatattgagcaccagcaatcgtcaaactaaagtacgttttttgtccagattcaagcttggcaataattttcgcttgtaagtcagctttactgatagctccttcaagattaatttttgtcccttgccataaaattggccctgtttctttaaaatcaatagtagtcttaccactattttcatcaatctcacctagatagcatcccttggctcccatctcattaatgtggcgaccttgaatgttacctggataaacaatccacggcgtactacttaaattatttctcgcatgaatatgacccaaagcaaaatagtcataattcaagttttgcaactcatcaactgtaaacggtgcatacacattctgactagcagtagctgatttctcttgagcatgcattaaaccaaaagtataattttttccttttgctgggaattctgggattttatcctcagtgatatggttattcagatatgaaaagccgattacgtcatagttaaaacccgcatccgtagtaaaagtagcttgctctactgtttcattattgcctaacaatttaaagtaaggactgggactaactagcagatcttcttgcttcatgtggtcatgattaccaaaaatcatcactacctgaattttttggtcagttaatcgcttaatttgcttggcaaaaaatagctgagctcgtggtgatggcgtattactatcaaaagtatcaccagcaattaaaactaaatcgacattttcttgcaaggccagatcaacaattttagttaatgattgatcagctgcttgatagatatggttaaattcctcagattgcaaaaaagatagcccacgaaatggactatctaagtgcgcatccgcaaagtgaataaatttcatcgcgaatattaatttctaagatcttcataaagatcattaattggcttagtgtaagctttttgtacttcaccaagcaaatcgtacaacccctgttcattcgtaagaagtgaaacaattttatcattcttttgaacttgatcatttaagtccttgtaagcttgttgatcttcagctgaaagtggttgaccagcttgttgtgcttgcatgatcttattttgcaattcatccatctttttgaataaagctgaagcatccttatcatcttcaacagctttaattgcttcttgcaacttcttgtattgatcagtttgagtcaaatcttctgctaacttgttagcagcatcgtaaatgttaaccatctagtcctcctaaattttattggccaaataagcctttaaggctattataccattcattgattttctgtcctgcagaaccgagtccatcttgaattttttcacctaatccattagtccagtcatcattagaaccattattcttcacaatctggttaggtgccttctccgtgaattcagtttgcgcggtgtacggcaaaattccttccatctcagccttatataaacgcgtaattcctgtttcagaaatgccctgcatgtagtgttgcttgttagtgtggtcaaaaccaacccaggtagcaagtacaatgtcaggcgtataaccgacgatccactggtccttggtaccaaatccatatgagttaggtacttcagttgacccagtcttcccagctacacggaagccatttggctgagcagagcgtcctgtaccattagtgaaaacgccgagcatcatagtcgtcatttctttagcagtattttcagaaataacgcggtggctgcttggattattattttcggctaaaacgttacccgaagcatcagtaattttggtaataaagaaagaattattaggcaaattacctttgttggcaaaagctgaatatgcacgtgccatctgaattggcgaaacgcctgaagataatccacctaaggcaagcgctaaattacggtcactctttggtaccttaattccaaagttttcaacagattgcacgcctttacttacaccaatcttatccaatagccaaacagctggcacatttttactttgttctaaagcttcatacattggaattgtattagaatagccattgtccacattatgcggttcatagccatttttaccaaatttctgcaacttgttcgatagttgcgagtcatagtgatagccattttgtaaagctggggcatatactgccaacggcttgattgatgaccctggctgccgcttcatctgcgttgcacgattgtaaccccggaagacgtgcttaccgcgaccaccgatgattgcccgaacagcaccagtacttgggtccattgccacgctagcgccttggctttcagttccatcactaccattttgtgggaaaagccagctttgctcaaaagtatcctgcaatttaccctgataattttgatttaaagtagtataaattttaagccccttattcatgacttgttcttcagttaagccatatttagagattgcctcgtcaactacagcatcaaagaagtaaggatagcgatagccgtttttattttgaaaagtattccgcaaagttaatccttgcttttgatacattttagcttgagccgctgtcaacttattattatccaccatcaagtttaagattaaatttcgtcttgctaaagcatttgacatgtgatcaaccggattataaaaactaggatttcgtaaaattccagctaaagttgcggcttcactcggattaagttcacttgcgtttttgccaaaatagcgacgacttgcatcttgcacgccccaaactccgttaccaaagtaagcattattcaagtacatcgttaaaatatcttttttggagtaaacatggttaatttcaattgcaaaaaagagttcttccaattttcttgaaaaagtctgctgctgggtcaaaagcgagttcttggctaactgctgagttaaggtcgaaccaccaccagttacttgaccgtgatgaatcactaaacttaaagtagctcgcgccatgcctttaatactaaaacctgggttcttccaaaaagtccgatcttcagtcgaaattacggcattttgaatattaggcgaaatctggtcatattccacaaatgatcccttttgcgagtataaagaacctgcttttttacccttgtagtcatagattgtagttgtggttgaaagcgaagccttcaaattagctatgtttgatgtcttaactttaattgtataataggtacaagttaagagcatcaatgtgagcaggattaaaataatccagcgtccgataaagaagcgactatcaaatcgatgccaagcatctttaaagccacctcttcttggttggtcgttattcattaaatattgctcctttttagaaacaagaaaattgtaccatactatcaaaacacgtgtttataactagattagacttaagaaattattatgagtttccgttttacacttttttacccagaaaatcttgctccggcatctgtcaatgaagtactacgtcaacttttaatccctcgcaagtggcgtcattttttgcgaattgaacaaaatattttagttaacggcaactatcgctattttaatcaaaacattttacctggtgataaaattgaaattaacttggatcatgttgaaagtgatcaacaggcttatgcaccaagcggtaagatgcccgatgttatctatgaagatgataatcttttaattattaataagaaaaaagggcaaaaaacgcaccctaatctaaatgaaactaatactgctctgaacgattgtactacttatcttggtcagagtccctatattgttcatcgattagatatgttaactggtggtttacttttaattgctaaaaatcctgcagttgtacctattttaaatcgtgaattaaccagcaaaatttttcatcgcgattatttagctaaagttatcaatgctgatcacttagctgaaagaggtacgattaatgccccaattggtcacgatccacttgatcaacgcaaacgcaaaatcgatcctactggattaagagcagttactcattatcaagttttacaaaaaaatgatgacaatactgcgattgtcaaattgacgcttgaaactggtcgtacacaccagattcgcgttcaccttgcctctttaggaagtcctattgtaggcgatcctttatataaccctgattttgccagtgagagattagccttagatgcttacgaaatttcattagttcaaccttactcttttactaaattaaatgtaaaattgcccaaaaacaaaattgaactctaaaaaagcctttgactgcaatactgcaatcaaagacttttcatcaaattataaattttaccacgcgtggtgctagttaaatcgttctagacaataagccaaattataagctaaaattgcaatttccaaccggctttgaaagcctatcagactacgtgctcgattgttctcggcattgtaataggtcagaagcgaaaagtcgctttcaattgttctgcgaatagccatcaattgatgatcattgtgctttttagctcctgtcatatttttacgatatggtgtccaaagttcgtaacccatttgttttagctgttgatgcagttctttgcctaaatagccttcgtcgccaagaagatagtaattagatggatgggtattttctatcagttcaactgtctccctggcatcatgaactgatgcctttgttacgacataatcaagaatgtaaccgtcatcgctaacaatggcatgaactttgaaaccatagaagtaaattttcttggtggccttataaccaatgttggcataaccgcgaaaaattttagcacgatagttgcgaattggttggcaaacaggtaccggaaagctgtcaatgatcaagaaatgtccattcaggtcaacctttttattcatttcttgccgtatctgataaatcaattgcaatagctgacgtgaacgccgattaaaacgtgagtgtgataaacaattgaaacattcacagaatcttctttgtgattcaattcctgtcttagcttgccagataagtaaagccaaaatcagactgtccgtagttttaatttgatcaatatttcgccgatgagtaaactcagccggtgcatacaaacgataccagtgccgacaaattatcactaaatctttaaaactaacttgtaaatggtggctaaaacgcttaagcttaaggcagttcaatcagatcagactcttttctattattactatttacaagtcgagtctaacaagattggacttttttattaactaaaacgatttaactagcaccacgcgtattttaccaattatattcatttggatcctttttacctaagccagttgtatgatcaaggaggatcctctgctcataatgagctacatttagcttagtcgccttcaccatgtcagggttaactgatacaaaatcaatgccacttctgactagaaattcagtaaattctggatattctgatggtgcttgaccacaaatcgaaaccgtcttaccatcttgatgagcaacctttatcaagtgcctaatcgcccttttgacggcaagatttctttcatcaaaaagatcagcaatcacatcattattccgatcgcaccccagtaaaagcatcgttaggtcatttgaaccaattgaataaccatcaataaattgattgaactggtccgccaaaataatattagctggaatttcagccatcatgtaaaccttgaagtctgcgcttctaactaaaccttgtgtccgcatgatttccgtcactttgcgcgcttcatccactgttcggcaaaatggaatcatcacatgtaaattctttaatccgaactcatcgcgcaccttttttaccgcttcaagttccaatttaaaagcattaatatattttggatcataatatctagaagcaccgcgccagcctaataggtctgctggttcatgcggctcatatttgtcgccgccctttaagttgcgatattcgccagacttaaagtctgaaaaacgtaaaactactggccgtggtgccattgcccgcgcgactttaccgattccattagctagctcgttaactaccctctctggatgaccagtttcaatcaaataaaggggatgctggtgaatataagtcgtccataaaaattcttcgcgcattaaaccaatcccatcagctggcaaagatgcatatttttcagcaagatcaggatctcctaagttcatcatgactctggttgcagttggtgggaaatattcaactgcagcaggctcagctggcttttcatcgacttttttaaccgcgtctttaacaactccagcataaaccacaccatttttagcatcgacggtgacagtctcgccgtttttcaaagttttcgtagcagcttgtccacggctagttgttccaactaaacaaggtatctgcatttcacgtgatacaattgcagcatgacaggtcattccaccattattggtaataattgcggccgcctttttcattgctggcacccaatcaggcgacgtcattagagtgaccaaaacctcgccctgcttaaattcattgatatcttttggatcatcaataatatgtaccttgcctgagacaaaaccaggtgaagctggcaagccttttaacaatactcggtgttctgtagttgcttcttgtggtgcatcggttttctcctgctttttcttttgtgaccaaacagtttctgggcgtgcttgaactaaccacaacttatcattttgatcaagtgaccactccatatccatgtagcagccataatgtttttcaatttctttagcataaccagctaattcaatgatttgcgcatcagtcaaagcaggcttattcacttgatctggtgctaccttttgttcaattgttcctcccgatggcaatctgatcaactcaattggctttttagtcaccattttgtgtacaatcttcatcgtatttttatcaactacatagttatcgggtgtaacagttccagacaccacgtattcgcctagtccccaagaggcctcaatcataaccttagtgtcatcaccagttgctacattgaccgtaaacatcacaccagctgctttagaaaaggccatcatttgaatcgcagctgataaagcaactttttcttgtggaaagttttgtttaattcggtaataagttgcccggtcggtgaaaagagaagcgtaacattcttgcacctttttcaaaacattctcacgaccatgaatatttaaataagtatcttgttcgccagcaaaactagcatcaggcaggtcttcggcagttgcactagaacgtacagcaacgaatggctcattttggtgcatcttttgggctaagctatcgtaagcacagctaatttctaaggctaaatcatttggcatcggcgcttctataattaattttctaattttggtgcaaattcgatgcaattgctcagaatcttctggatcagttaaagtggccaataatttatcaattttttgatttaaatcagaataattcataaagtggcgataagctatggcagtagtcgcaaaaccatacggaaccgggacattcgtttcagaagtcaactcacctaatgaggatgacttaccaccgactaaatcaacatcatcgcgatgcaattgatcaaaccacaaaatataattatctctattcatgcttgttctcttttcgttaacgcacaactaacatttcatttttagctgctttatttaaaaccacgaaactgtcaaatcttttgtgtaaatagttctttctcgtaaattgattttttaattatttatttaatcaaagtaggattctaaggtgtcctgaacctgaccaaagcctttatgaattcgattgaaataacggtcattgtagctcattgcctgaataccaataaaagcatcaagcgactgttcagttggaaactctgccttaggcttagctttgcgcttgatcacattgttaaatgattcaatcatgttagtcgaataaattgaagctctgatctgcttgggatagttataaaagaccagcagatctggttctatgtctttcaagcttctgataacatggctgtaaaccttgccccatttggtatagaagtcatgcaggacagctgtggcttcttctttgtttgtctgttgatgcacctgtttgaattcgttcatgatcttttcacgatcgtcgacgcgtactttagcgcagatattgcgcatgacatgaaccaaacagcgttgaaaatgagctttaggataagtcctggccaaggctgttttcatgccaacaacaccatcagaaagaaagagttcaacttgcttcaagcctctggacttcatgttttgaagcatctctgtccagacttcaatgttctcactaggagcaatgcagtagtcaatgacttccttatgtccattaggtttaatgccaatggcaatatagactgcttcacgctcaaacgtttctcggcgcaaaggaaggtatgtcgcatccaaatagacgcagaaaaacttgtcgcttagcttgcgtttgtggtaagcctcaacctttggaatcatctgcttggaaatatttgatacctgagctggactgtaatggctgccatacatcttttcaattagatcggctatttccctggtggtcacgccattggagtaaagcttgataatcatgctttccaagatatccgagtgctgcttgtagtcaggcagcgtgtgctgatgaaattgaccgttgcgatcccgaggcacttgcacttcaattgggccaaattgcgtatcaactttgcggaaataagcaccatttctagagttgccagtattccagccatttctggcatagggatcatagcccagaaaggcagtcaattcagcttctagcaagttattaacagcctgttgtagttctttgcgcaataaatcatttattttgtctggattgaatagagcttgagcaaaatctttggtaaaatcattcatgaaggagttcttctttctgtatgtgttttttttgttcaaaccaatcatacgagaaaggaactcctttttctaatgtttaaagaaataaatttaaggaatcattcatccttacacaaactattttacagtctcaaaacccatctttagcgggtgctacataacttaaatatttcaagttattatcaacagcagacatttttactatcccgcaattatcatattctttaaaagttggatttactcgctgcgtaaataaccttaaagccgtcccatgtccaacaatcaaaattgtatcgttggcatgggttgaatcaatgattttagtgatcgctcgttccattctttcttcaacatgttgatccggctccattgcggcattaatacggctaaagccacgtcgccatggcaacatgaattcatcttgtccttcatattcaccatgagatttttcatgcaggtcacgcagtcgcgtataagacaattgattatcagttataatttctaaagtatcgcttgccctttcctgctttgagcaaaatgcggcatcaaaactaatttctttttgcaaaaaatacttccgcaccgctgtcgcctgcgctttccctaattccgtcagaggagaatcacaagtaccttgtattttatgatgcacattgaacaaagtttgcccatgtcgcaccaaatatattgttctcattaactgctactctctttccttttatgcatattaattgtgaacaactgtatagtaccacaatattttgaaagcgcttaaagttatatattaagtatatataaagctatataccaaatttgtgaaattaatataatgattatgcatttatttgtcaaaagtagatttggcattatctagggcttgttaaataatgttcatatttggaacggtctaatttattgagttgctggataattataaaattgtgatgattgcagccaaatagtaaatctttttaattaatttaaaagttagtgttttttaatgctattttcttgcttttttacaaaaaactatatctatttttcgagttaagagtataatttttggttgtactatttttcacttattttttctactaaaggagaagaaagtatctattatggaacatacttggttaatgaagtattttgccgaatttttcggtacgattattttagttgttttaggtaacggatcagttgccaattctgtactacgtgataccggtggtaatagccgtgacggtcaagccaatggtgggtggctcttgatcgccttcggttttgggtttggagtaatgctcccagccatgctcttgggttcaatttcagggaaccacttaaaccctgctgttaccttagctcaggcttgttcaggcgtcttcccatgggatcaagtaatgccttacatcttggtacaaatgcttggtgccatcgtgggacaactaatcttagtagccgtctactggccttacattggcagaaccactagtgatgatgctgtttttgccagttttgcgactggtgattcggctaacagtaagttcaacggttttattaccgaattctttggcactgctattttgcttttcatcgcagttggtttatatcgtggcatgttcttcaagcaatctgaagacattgctaacatcggggttggtttcttaattactgctttagttatggcagttggtgggccaactggaccagctttgaatccagctagagatctaggtccaagaattgtttatgctttatgtcctttgccacacaaaggttcagcccactgggattacagttgggtaccagtggttgcaccaattgcaggtggaatctgtggtgcattattatacaaaattgcatttggattataagagatctaatcaaatagtaaaaaaagcattaagctatctgcaatagcttaatgctttttcaatactcggtatctaaacctaaatagaaaattgaatctacatttttagtttcattatccgaattatcttttaaaaaaatttgtggtatatctccaaaagtcggattaaaaggatttttcattttaaatctctttaaatctaaaatagagtagagggagttttataactcgcccctctcattgcaccggacgtacggttccgtatccggcgctacgtttgtgattatttacgagataaataatattctagcggatcgaccaagcctgggcgatccgctttgcttatgcccaatacttttgggctaagcagaaagttaatgacatgacccgtacttcttttataccaacctaagcgcgtattagctactttatgaatatcttcatcactaaaattgcactttagtgccttgttaatccgcattaagttaatgtatattcgttttggtagtttccattgtttaatgattaccacccgtactttatgacgcagccattgactgaacttaattagaaaatatttcatgtcgccaactctaaagtaattgacccagcctctaactacttgatttatcttagtaaagactagtgatagaggctgagcagctgcttttctgcgacagagaagttctctcatcttgtcataaagcttgattttgcggtcatctcctggctttgcttgccagtattcgccacttttccagaaggtaaagccaagaaagttgctcttggttggtcgtacaactttggttttggttgcgttgacctttaggaatagctttctttctagccatgatgaaattgaattcatcacacgtttggctgatttaccgcttttgaaaaagatattgcagtcatcggcatagcggacaaagcgcaggcctctttgttccaattctttatccattttatctaaatagatattggatagaattggtgaaagagggccgccttgtggtacacctagtttattaggcttaacccaaccatcttccattactccagctttaagaaaggctcgaattaaatggagggtggttttgtcatttacttgctctctaattattgaaattaatttatcatgatttaccgtgtcaaagtatttctcaatatccaggtcaacaacccattgatagccttcgtttaaatattccaagacttgttcaatagcgtcatgagcactgcgtccaggtctaaagccatagctatgctcactaaaatgaggatcatagatcttcattaatacttgggcaatagcctgctggattactcggtcaacaaccgtgggtattcctaaaggacgtttcttaccattagctttaggaatgtagactctgcgaacagcttgcggacgatacttcatcttcatgatggcgtcctttatttctacttgatgctttttaaaatagctatcaagctcatcaactgttctcctgtctacaccaggcgctcccttattgattttgactctcctgattgcttccttgagattattttgacttaaaatctgttcaattagttccatctcgtgatatctccatttctacttgtaaatttattcagaattgtcccaattgctttcaccatcaaagagttacgttctctttgtgctaggctatcctcttatccggactgtctgaacattgcttatagcgagatatgctcttacaaacattaggcccttcgctccagtttcattacaaaaccttcagcactactacgacctcagctgacttctcgcgattaacctttttcgaccaggcttacgatcgctgatattaaagcttactcggtttcacctgtccacgagatctctcggggtaagacattcatctttaattttccactgccccctggtttaccgtcttggttttacggttgtcctttggactttaacttgtgctgcagtctcatccaccatttggcctgaccaggtttctgtacgtaggctcggaaaactcgctagccacttccttcacccatagcgtcaccgctaacggcttgtggttcgctacacttggcgacaactacccgtgatctagactttcactagactagacaaatgccatgcccgacacacaacgaaaaaactgtctagttcttaactagacaatttttgcgttaaataatcccacgctgcaacgccataaaaattgtaataatcaataaatctgcactgccaccaaggctataatttttctctttaaaaatctgatttagttctaacataaactgtttaccagcttgagtaccgtagccacctaatgccaaatatttttttgcttgattatgtgcccaagaaacaacctcaatatttcccgctctttttattaaattcgagtcttcaatcgcactaactattttcatcaacgtatcgagtaaacgaacattcaaatcaccttcggtttgagctaaaaatggcagtgctacatccctcaccaaaggataaccagcttctgcttctgctctaactccacctttaccatattgcaaaaattgtttttctccagcagtctcattcctcttgcctaaatcgtgctttactaagcccttagtcatctgctggatcacttcaaattcaccttgattattattttcacaatagctacttgcacagccaaacaaccctaacgaaaaaatcgcgcctttatgggtatttatattatgcgttgtcttaaacattgctttttctgcctcaatgccagcttgacgcaattgttcaaacatttgccgcaaatcctgccccgtaaaatctgctccaattttagctgcttgccgaaaataattttctaaactcaaactgctattaataaacaaatacacattcatatcaggatgagaccccacgtcaactggatccactaaacctggcttaggattggtaactacttcataaagcaatgcttttagtgcgttttgtgtgatcttttctactgacattttgaccccatttccaaaatagctaaactaattttaacatgattatcctttcgcctaatttaaaaaaatgacacaataatattaggaaaagaagagagcaagttcatgaaaacagatcaatttaaaagctatcaaatagctgatattggcgattatttaaaagtattcgcctgcagcgcagtaatctcacagccaattatgtcgctggtcatggacgtagaacaaccggttcacacacaagatgtttttggcgttttttataatttagtcaaatatacggctccagcttttatttttggtattttgtataccacaatccgtactaataatgaaaaaaatagtttttcttatgcaaaacatatgcagacaaattggtctaatctttttgtacctactatttggtggacgttaatctacctagtagggatgccatggctgcaacaagttaaccattttaacaatcttggttcattctgctggcaattcattaatgggaacgccgccccgcacttgtggtataacacgatgatgttgcaattcatcattttaatgccgcttttctggggattaagccgctatgtaggacacaatctaactcgaggtatttggattgcagtaatcactttcgtactctattttgtctggctttggttctatgattacaatgtcttccatggcatgcacgaacatgactggtatttactcgaccgcatttttatttcattcttcatctatggtgtgtatggtgtcttagcatggcgattgcgtggttattacaaccagctggtcactaagttttggtgggtaattaccatattatttattgcttgcttcatttggactaatgttgagttgcacaagttcggttatccaatcaacttcaataatgcaccatattacaagccgtcaatgactctttattgtttagcagtaattgcactgatttcagctttttgcctgcatcaagttagaaaaaattcgcaaaccagtttaaaagtattccatttcttggctacttatgcttatcgcgcatatttatccaatgtcttctggaatcaattagtttggcgcggtcttaacatgcaatatcacgccatttaccacccattcttaactttctttggaatcttgctgttaacctggatcttgtcattcacttcggcttattgcttacacgtttggtggacgaaagcgaagagtttaattagcagcttttttcgttaattatcaatttcatataattcttctgcttctaacaaaaagtctttcatgaatggcagagaaaatgccactttgccatatcctgcatcaatgattacctgactatccattaatcgctgccgatattgcgaaatataattagaactttttcccatttgcttgcgaatatcacttatattaacaacatttttatcattatgagccatgatgaataaaaattttcgatcgactggcgataattcagagataatcttgatataagcattacgaaacagatcatttttaaacgatgagatcgaattttcaatactttcatctgttacctgatcagtagaatgttgccaaacatgatatcccaagtcttgaaatgcataagcgtaacctctagtcagcttagtcattttcattaaggcagtattattaatctctttattacctctttcaaatgctttttgataccgatacttaatatcgaaaagatcaagtggtcctaatggtacacgaccgcttcttaaaagaaatgttaatacatcattattttggagttcagaaacattcttaggcagcccagtcatcatcatattaattgaatacttttttaacaccataatttgatagatagacgccaaattaacaatctcaggagtttctttaacctcatctattgctatcaataaagattggtgatgcttttttaaaacttttaacatttcttcaagtaacacttgataagtagattgaggatttgatatatgaacttccaattcaaagccaaaagccgaaaactttacaccatcaattttgttcaacgccttttttactggattcgctgcttcttgataaatactttggatgagcgtggcaagcaaatcatttgtcatggctaagtaaataacaatccagttatctttttgttctaaagttgaggtaatatcagcaagtaatgaagttttaccaaccccgcgcatcccatagatcattgaagtttgatagggtccggtgccactttcaagtgatcttactatatcttctactattttttgtcgccccaaatatattttgggaactttgccaaagttagggtcaaatggattcgttatttcagacataattgatgttcacctattttcattattttagttgttggctttaattttatatctctttagatcttatgtccatttttatatctctttagatcttatagttataaaaaatgctcaaaaaattttgagcattaccattttatgagttatcgaaaaactatctcattaataaaaatttatatagtggcattaactgaattatcttatcttcttgctgaatttcagcctcttcaccatgagtaacgattattaagttttcaacttcatcaaaattatcagctaatttaattaggttcccaacttcacgttcttttgacgtatcatttacttcccatgcaacttgaattgcaattttactagctggtacataaaaatcaatatctatccctgtcttttgagattttaaataaaataaattctcttgatatttattatgcaacttgatcgcaactagattttctagtaatgctggcaatttatccagataaaacaaatttaaaatgccattatctgtaaaataatactttgggctgctttcacgctcactaaatttagcaaaataatttttggtggaaaataacaaatatgcatccttagcgtaatcgatataatcaataatcgaattgcgacttaccgtactaatcacattttttatatttttatacaaagttgcatatgaaacttgagactgtaaaatagtttgtgtaaggatgaatgattccttaaatttatttctttaaacattagaaaaaggagttcctttctcgtatgattggtttgaacaaaaaaaacacatacagaaagaagaactccttcatgaatgattttaccaaagattttgctcaagctctattcaatccagacaaaataaatgatttattgcgcaaagaactacaacaggctgttaataacttgctagaagctgaattgactgcctttctgggctatgatccctatgccagaaatggctggaatactggcaactctagaaatggtgcttatttccgcaaagttgatacgcaatttggcccaattgaagtgcaagtgcctcgggatcgcaacggtcaatttcatcagcacacgctgcctgactacaagcagcactcggatatcttggaaagcatgattatcaagctttactccaagggcgtgaccaccagggaaatagccgatctaattgaaaagatgtatggcagccattacagtccagctcaggtatcaaatatttccaagcagatgattccaaaggttgaggcttaccacaaacgcaagctaagcgacaagtttttctgcgtctatttggatgcgacataccttcctttgcgccgagaaacgtttgagcgttgagcgtgaagcagtctatattgccattggcattaaacctaatggacataaggaagtcattgactactgcattgctcctagtgagaacattgaagtctggacagagatgcttcaaaacatgaagtccagaggcttgaagcaagttgaactctttctttctgatggtgttgttggcatgaaaacagccttggccaggacttatcctaaagctcattttcaacgctgtttggttcatgtcatgcgcaatatctgcgctaaagtacgcgtcgacgatcgtgaaaagatcatgaacgaattcaaacaggtgcatcaacagacaaacaaagaagaagccacagctgtcctgcatgacttctataccaaatggggcaaggtttacagccatgttatcagaagcttgaaagacatagaaccagatctgctggtcttttataactatcccaagcagatcagagcttcaatttattcgactaacatgattgaatcatttaacaatgtgatcaagcgcaaagctaagcctaaggcagagtttccaactgaacagtcgcttgatgcttttattggtattcaggcaatgagctacaatgaccgttatttcaatcgaattcataaaggctttggtcaggttcaggacaccttagaatcctactttgattaaataaataattaaaaaatcaatttacgagaaagaactatttacacaaaagatttgacagtttctgaaacttggtgcattactgtatcggcaatttttctaagtaataatgaaatcgtcttttcattacgaatcttattgcggacaatgatatcagctaaaaatacattttgataaatacttgttaagtaatttctcttgtctgttaagataatagattctggcaacccaccataacatagatattcatttgcggcagcacgaatttggccattattaactgtatccaagacggataatttatcatgtggaatttttttagcagttaaatattctgtaaaactaaaaggtgccacatatttggtcatatatcttccacccagccgcagaacaatatcatgacccaacaccttagagttactaccggttaaataaacactttcaccttgatctgctaaacgacgagcaaatttttcccagccagcaatattttgaatttcatcaaataaaaaataatgcttcttagttgttaattgattggctgcaattaagatattattacaatcagccaactgaaaaccatctaatcgttcatcttcaaaatttaagtaaacaatttgtgaccaatccacattttgtttattcactaaatcctgcgcccttttaaataatagcgttgatttgccagcccgccgcaaacctactaacacataatttaaactattttcaaaatgataatcacgaggaataatagcaatatttttaatattattctgaccttcaagaataagtgccgcaagtaaatctggattcatgttttgctcctatgtaatttatattaatcaaaataattataattttgtttaatatattaagcaaatattgcgtatttagagttagtatatttttaaattaaaaaagtccagctttcgctgaacttcccttcatttcttcttcggcacaaaggcaagagccaagagcaaattaataattatcaaaatcagtaataccataaatgtccacttagaaccgactgctgtgccattagtcagatatttattctgcgctagcgcaatcaaggtctcagctaaagctgttcctaaagcacctgaaaattgctgcaaagtattaaaaatcgcattaccttgtgcatgattttctttgcctaaagtgatcaaaccgctggtcatcaaactgccaaagcacatcccgtatccgccataataaagaacgtataacaagacaattgccaggttgcttaatggggctaaaacattcatcaaaatcaaactagcgattatccccataataatcggcagccgcgcaccctttttatcaaacagctttcccgctacagccgccattagcgcgttaattaccgcaccagggaaagtaacccagcctgctaatgaaacagaaccatgattgacagcctgaacatagattggaaagatgaagcccaaagctagcgttgcaattttggcaaaacaataagctattagctgcatactaaagcgtaaatttttaaacagtttcggactaatcaaagccgccttatcagaccaagatatttttagccaaattaataaactaataattcctagaattaagaagcccaaaacttgaattgagaaaaatgaatgtttagcaatccgtgtaaagcccagcattaaacagaccagcccaatagccaaagatagccattgcacatacttgaacttcactttttcaagcggattaatctgccgaattgaatagcttcccgtaaatagactcaagataagtcaactaccccagaataaattctggggcttggtggctggctcgttagcttgcgctaaccagaacaccaacttgcttagatacggacttgacttaccaacaataatcttttgactattgccgatagaggtcgtctaattaccaaagccttttgagtccgcgagttgcgagcggactgcagcctagcttaggctgctttttttattttagaattctgccagttgcctaagcctttttctaagatgtttactgccgcattccaatcacggatatgatgcgtttgacagattggacaagtccattctcgatccttaagcgttaatttcttataaccgttttgtcccataatactgccacattgatggcatctttgggtggtgtacttaggatcaattgttttgaactctttgccatataggtctgccttatatgccagcatgttcagaaaactgcgccagccaacatcagaaatagcttgagacaaggcatgattctttaacaggttcttgcttcttaattcctcggcaactactaaatcgtggtttttgattagtgcagttgagagtacttgcaagaagtcatttcgctgtctgcgaatcttatcgtgcagtttagcgactgctagacgctgtttttgataattcttggctaagcgcaaattgcgtccctctttcttagctctgcgctgcctgcgagacaagacacgttgggcatgggcaagcttctttttggttttgcgataaaatcgtggattagccaccattgctccgttagatgctgttaagaaattatcaagattgaggtcgatgccaatttgactctgcgtcttaggcaattccttaacaaaggcaatatcgctgcctagttgcattgataagtaaaactggtcgtcagcggtctttttaatcgtgactgtgccaattctagttgggatatgattaagcaaacgctctttaatcaattttctaaagctggcaatgcggacaacgcctagcttaggcaatttaacgtgcttagcatcaataaatctagctgtcccgttatcaagaaaggcttctgtctgtttaggatactgacagttggtctgatatgaccaatcactacgttttttgtgaaaagtcggaattccatgaccaagcttgcgatagttgttccaagctttctgatagttttgaatcgcattggcaatagcgagactgtcaatttctttaacgcgtaaaaagctataggcatcgcgaatgttctttggcttagccaataactcattattggcgactacttcttctgctagcttagtctcataattattaagaacagaaaaggcaaaaggcattacttgatattgtctaacagctaagtagcccttagcccgataattgttccgattacgtcctacataagagttgtagacaaaacgctgagcatcataatttagcttgatgattttcttttgtttagaactaggataaaagcgtactttcaagccaaaatggtaggctaaactgctcattctcttcatgtgtttcacctccttctgtagattagatatttatattttacaggaaagtcgaacatatgtcttcattttttaataaaaaaagctgaccattaggtcagcttggccctatccatccccgcattaaaatacggggaatttccgggcgtttttcattaaaaatagcgaaataatgaagatccagcgccaattaagtgcatcggtaatcattccgccaaaaactggccctaaggcaacgacacaggcagtaatcatagtgccgattcccatcataaagcctagtttttctttaggtacttcagccaagataatattgtacattaacggtaagccaatccccgtgccgactccttgcattgcccgtcctaataacaataaatcaaagcgcggtgataaaatatcgatgattagccccaaagtaaacaaaagaactcctagaataaaaattttcttagtcgaaattcttaatctaatctgtgagctaattggcacaatggtcgcaattaccaataagactagtgtgtttacccattgaacttgatcagtagtaatcgaaaattctttaattaacgttggaaaagtaactgtcgtggccgtttcatccaatattcctaaaaatgagagcatccctgccgacaaaatcgctaataccaagcgtggcgtaacttttttagccattttccatcttcttttctaaataacttcagtgcttttgatataagttcattatactgtttgtcgactgccgttcacaaaaaaataaagctcaagcaattctgctgagctttactacttaatatcttaattttataagccaaacaataacaagttctttccttctacattcatggagccatccttcttaagttgattcaatgaacgtaaaacaaaatctctttgactgccacgtaacttcttagcagctttcattgcagcgttaaagtcacgtttgttgtttgccttcttcagactggtatttaatctattagcaattcgcttgagtggcttaatcacaccttgcatagacttgctgtttaggtagtagtattgcaagaaagcttgagtaatccaagttgaatactttttatcctttgaagcgactacaactaaatattaccaatttgccgattatcttactgaattataaaaactaataagactatttaagctaagcgtgttatattgatattcacgttaacgttcaattttctaaaattttcaggttacttactatttattaatctatagagttccaaaatacctaaaactagactaaatcctcccaaaataaggtagtcatatatcgattcagaacgttctatctgtactattaatcttgcagcagaccaacccgtaaaaaatataaatataaacgctaatatgcctctagcaactctactagttaaaattcctctcataatacttttttatactcccatttaacagattgtagatgttttctatgagagtcagtataagtataggtcttccaagcataatattcataccctctagtgcaatattcttttatcgtataccatttatttttaggattctttccaaaaatatcattataaacagtataggcaaaaccgccggcagaaacataggggccaactacaggaacaaatccaagcaaaccaataataatatccttagtagttcctttcagtcttcttaccgtatctgcactatatttctctgtcgtcaaataataatactttctacctgcatgtttaaatgctaccttaccatttgcgtacgtaaaattaataaatggatcaaaaccacctacacttgtcgtaggtaactggctattatttatatcaactgaatatacttcctcattattcaaataaatagtatatacaccattatttgaaacaatgcgatatgaatatatttgaccgttatatttaatctttccagctaattttgaagaattatctggaagaatttgcatttcagttccatctgttagcttaacactctgccaagtgtatctactactttcttgactattctggctacttttagccgaatctagcatagaagcattaacagtattaggaactatcccttcccctgctgctaataacattgtagctgctatcaaagatacaatgcctttagatatacttctcacaatttcttccccctcaacattaaataaattcttctaacttcagttttatattaattttaaatctgtgctagaaatatcactaaaagctgaacaacaaaatattatcttcagccttatcaatattgccaacttttttcacttgattcaaagattctaagacaacttttctttgattagcaggtaatcttttagcagctaatacagcttgattaaaatcttgcttattccgaatcttctttaggcttgaagagtttctagttgtcaatttagacaatggcttaattacttgttgcatctttttagtattccaaaaatagtatttaatagaataacgcgttgtccagcaactatattttttatctttagagacaagcagatactgtggtgctccaccaaattttataacctttgtcgcataagcaactttttcaattctaaatctaacgtttttaattttcttccaactaactgattttgcgttagatattggcttagtagtagttaattgtttcttgtaattcttttgccctacataaatcttccctgatggggcttgaatagttaacacataaccttgttttgttaggttaggcttattaacaatatttgcgacgggttttccactctcagtagtattggtatcagctacagcttgaacccgtttaggtgcagtcattaatacaccagtggtactagctactaataatacactagttactaatttttgaaatttcaatttttccactttccttttatttattaataccagttgtgagcctgccaaaatcttttagccgccgaccatgaaccataacgtcccttaacatatcgtaaggctgttttttcttgatttgctttgctataatttccgtttaaataagtatttgttaattgaaaacgcccaatatagataccatttcttgcattgtaatttccaccagattcacgtgcaataatccacatcttagcagctctctcttttgctgaaagactatcataatattttctctttaatgagcttggaactgaagtatctgatctaagatatataccaaatagtcctgacaaatcttcattttgtggaagatataatggcgtgccattagcaatggttttatctggatcaatattatcattcaacttttccaatacacttaatgaagtgttgtttgcttctgcaacttgacgaagagtttgattatcacggctagctactggcgtaatcaaattcttatctggaactgcagtatttgcatttacctttaaagtatttgtagttgcttgttgtgaactatcggttgtatcagcttgaacagccttagtaccaactgtgaatagcatccctgcaacaactgcagatgacaataataagtttttcttgttgaaaattttcattttcgttctcctcattaaatcaatgaatatcttgaaattcataagttacttactacctattcataatttacataaactatagtaatgcaatcctggagactgtcaagaagtttgtgtaaataatctctctcgttgattgacttttttatttatcttttaatcaaaataggattctagggtgtctcgaacttgcccaaatcctttatgaatcctgttaaagtaacggtcattgtaatccattgcctgaactccaataaaggtgtcaagcgactgctcagttggaaattctgttttaggcttggttttccgcttaagcctgttgttaaaggattcaatcatgttagttgagtaaattgaagctctaatagctggcggatagttgtaaaaggttaacagatcaggctcaacctgtctaagatctctaactacgtttttgtaggctttttcccagttttgatagaattcatgcagcacctgtacagccatttctttgtttgactgagtatgaatctgcttgaattcatccagtgctttttttcgatcgtcaacccgcattttggcactgatattacgcatgacgtgtaccaagcagcgttgaaaatgcgctttaggataggactggcagatagcctctttcatgccaactactccgtcagacaagaagagctctacctgttcaaggccgcgactcttgaagcctttgagcatttcgctccaaatctcaatattttcagtaggcgcaatacagtagtcaatcacttctttatgaccattaggtttgataccgatggcgatataaactgcttcgcgctcatgagtgacccgcttaagaggaatataggtggcatcgagataaacgcagaagaacttatctgacagatgtcgctgatgatatgcctcaactttgggaatcatttctttagaaatattggaaaccatagctggagaataatagccgccatacattttctcaatcaaatcagcgatttctcgggttgtgacgcccttggaatagagcttgataacagtttgctctaaaacatcagtatgccttttataatctggcatagtgtgttgatgaaactcaacgtttctgtctctaggaactttgatttctatttgtccgaattgcgtatcaaccttgcggtaataagcaccatttctagaatttccggtattccagccatcgcgctcataaggattgtagcctaaaaaggcagtcaattcggattcaagcaggtcattgacagcctgttggagcttttgtctaaataaatcattaattttatcctgattgaatagagcattagccatatctttggtaaaatcattcatgaaggaatctcttttctagtatgtttttcgttcaaatcaatcatacgggaaaaggattcctttttctaatattcaggaaaataaaattaaggaaatattcatccttacacaaactattttacagtttcgcatttgacatcatatttgcaataaaaagacagagtagtattacctgctactctgtttaattaatcaattatttttcagtatttgtcaattttatgcacataaaaaattcctaatgtactgtattccaagaaactggaactgaagtcaatcccgtggctacgcttccagtacttccatgtaagaattcagttactggcttgggtgccttgaaatgatgtgtttgaatatattgcgtaatttgataactgagtcgaccataaattgtttgaacagattcacccttctcggctttatcaattgcttcgtcaaacatgttaattaattctgcgtcatgctcaacttcgggcgtaaaacgtacttcctcaagtgcattttttaaagtcataatatctggtgaaaattctgaattcttatccttctttttgccaaacataattattttcccccctcattatcaatgagtgtaatcctctatctatgatattcaaagccataattttcctctaaactaaaaccaaaactgtataaatagctatatatgtaatgaaaaatattgataaatacgcgtggtgctagttaaatcgttttagttaataaaaaagtccaatcttgttagactcaacttgtataataatagaaaagagcctgatctgattgaactgccttaagcttaagcgttttagccaccatttacaagttagttttaaagatttagtgataatttgtcggcactggtatcgtttgtatgcaccggctgagtttactcatcggcgaaatattgatcaaattaaaactacggacagtctgattttggctttacttatctggcaagctaagacaggaattgaatcacaaagaagattctgtgaatgtttcaattgtttatcacactcacgttttaatcgacgttcacgtcagctattgcaattgatttatcagatacggcaagaaatgaataaaaaggttgacctgaatggacagttcttgatcattgacagctttccggtacctgtttgccaaccaattcgaaactatcgtgctaaaatttttcgcggttatgccaacattggttataaggccaccaagaaaatttacttctatggtttcaaagttcatgtcattgttagcgatgacggttacattcttgattatgtcgtaacaaaagcatcagttcatgatgccagggagacagttgaactgctggaaaatacccatccatctaattactatcttcttggcgacgaaggctatttaggcaaagaactgcatcaacagctaaaacaaatgggttatgaactttggacaccatatcgtaaaaatatgacaggagctaaaaagcacaatgatcatcaattgatggctattcgcagaacaattgaaagcgacttttcgcttctgacctattacaatgccgagaacaatcgagcacgtagtctgataggctttcaaagccggttggaaattgcaattttagcttataatttggcttattgtctagaacgatttaactagcaccacgcgttgataaatacttaatcatttgtaaataggtagtttgtttatccggatgctcaaaaaattgttttaattttggccataatattggcaacaaaaaacaactaaagatcaatggccattttgctaaaccaaaaagaacaacgataattggaaataataatcccgcaataatcaacgtcttaattattttaagagcatattttttaccagtataactggctaaagtatggcgcccattgtttaaatcttcatgcaaatcacaagtattattagctaactgcaaagcatagaaaatgagtgttaaaggcaaacatcttatcagagtagttaatgctaagttccaggtcaaaggataagtgccgtaaattgtgacatagatgcttactagcataatgaaatacgaaataaaaaaagataccactaattcacagatcggtgttgcattcagtggcttaggacccgcagtgtaaaatattccaatgaaatatcctacaactcccattattagtactggccagccggtgcgataaaccaaaataatacccggaatcgccgaaataaagtaactaatccacactaagtttctaacatcagttaaaggtaacttcagacgaccaattggatttatatcagtcaaaaaatgtcgatctttgccatgaagataatcatagtaattatcagcaatattaactgctaaatcaaacagaaaaacatctactaagcacagtaaaatgttaatcaaattaaacatgtgatattgttgaaacgacattgccgcgcccaagacaaaccaaattacatttaatggcgccgtataaatctctgatagttgataatatactggccaagataaaaccttcttcatagtaacttattaatcctcccattttttacttacatcttagtctttttctaaaacaaaacatagttactaattttgaagatattatcgcaaactactactttagttattaatagctttcattacaactgatgaaacttcaccactttattcttcaatgaaattttttgcacctcaaagccataagctggtaattcttttttataacgcaaaaaggaatgatctaaggcaaccccagcctgctggccaagctcatcaaaagaaagctcaaagtccccagccttattatctttgatatattgccataatttattatatttgctcattttctaagataaatgttctaaattagatttttcaacaaactctgcaaaaaatggcaacgccaattgtactactcctctttgaggggatgtaatcaattgatcatctaacagccttgcacgatagaccgaaatgtaattaataggcttgtttaagatatcttgcaattgttttgtcgtgacacgatcggttccagctttgattattgcttcgataaaatcgcgatcagttttggaaagatccatatacattctttcataggcattcctaaaaaggtccttttttgcagctcgaattgtttgtttcaaaacttcttcgtttaactgcaataattcccgactaaatcgccaagcataataaccaatcgtttgaaaggcataagcatagcctttaactgcacggctcatttcatccaataccatgaaatcaatttcacgttttcctttagtaaatgctttctcatagctattagctattgttttttcatccaacggtgataaataaacacgattactacatagtaaaaacgtgagggtattattcattctgtacttcggatattctgcttggcaatcctgtcatcaataatgaaatatcttattcatcaccaatcaatgtttgatattctgagccaaaagcccgaacatcgtcactaatttcaatttcatctattccgattagaattgacttaccctgcttttttaaacgacttagcaaaattgaaatatactcatcataatcaatttgctgtgattcttgtagtgcttgcccagtaattccctttcccataatattcaaacttttaacactttttaacaagtcaactaacgaaatacctgcaactcgttgcaaaccatgcattaattgaaaaagcaaatctccttgaccattatttaaacgaataaatatccaattatctaactcttctaaagatctttgaacatttaaaaggaaaactgtttttcttgatcctcttgtgacataaactaaagaagtttgatacttagcatcatgtgtttgcaacccagttaaataatcagttaaagcttcttgctgatcgataataattttaggaaaacgaccaaagttaggcataaatggatttaacatttttgcttccataaaagtctctttttatactttctttataattcaattttttattttatatttctttcccggatttaaaattgaagtgcaacactaagtgttaaacaaaaaggccatgaagacctaaacttgaagtgacgaaaaatcaagaaaggaagatcttcatgaccaattcaaattctagcatttctaagcactatcatcaattaaccagcgtacaacgtggacaaattcaagcaatgctggattccggcataacttcccgtactgttatcgctcaagaagtcggctgccataagtcgacaatcagtcgcgaaatcaaacgcggaagtgtcctgcaaagagacagcagctatttattgtatgagcactattacgctgatactgcacagatttattatgagaagcgtcgcaaaaactgctatcagcgcaatccattgaagcattatgctgtctttttgagaatgctctccagacgctttaaagctaaatttgatgccaccagcatcgatgaattcgttggtgaattcaaaaggactatgccaggctacccttgtcccagcacaccaactgtctatcgctatattgatcagggcttgctggacataagcaatattgatctgcctatgaagctcaaaagacgcaggaacaagcgtcatcacggccatagcggtcatgctttgcacaagaagcatcttggcaattccattgaacagcgtcctaaagagattgaagacagaaaaacgccgctgcactgggaaggagatctggttaaaggcgtcagacgcaagaatcagcctgctttaatgactttgaccgaaagaaccacacgctttgaagtagttatcaagattcctgactatcgggcaagcacatgcccaaggctgcttcaaaatgagattgacagacatcctgcctggtttaaatcgatcacgtttgacaatggctctgagtttgcggatatgaccaagatcaaaggctgccagatctacttcgcccacccatattctccatgggaaagaggcaccaatgagaactgcaatggacttctgcgtcaattcttccctaaaggcaaaagcatgaaagataagtcagctgcttatgttcaacaggcaactgatgccattaaccgcaaacatcgtcgaatccttcaatatcacacagcagaagaactcttcaagcaatatatttcctcatagcctaactgttgcacttaatttgacaattcaggttttatatttcttttataataagttcaattaagttatcaccaaatttgcctaaaaaaataaagcctagcaaacgctagactttatttaaataattatcaaatgattattcttcgtttaatgatgaacggtcgaatgaagcatccttaagttcgtcatcgatagtcttagtacctaaccaaccgatcatttccttcatagcatcggtaatagcttcagtacctggaagcaataacttacgtgggtcgtaacccttgttacccttgtctaagtccttgccagcttcgatgtattcacgagtagccttttggaatgccaattggaattcagtgttaatgttaaccttagcaataccaagttggatagccttcttaacttggtcttcaggaatacctgaaccaccgtgaagtacaagtggttcatttggaactgcttcagcaatttccttaagacggtcaaagttcaagcccttccagccttctgggtaaacaccgtggatgttaccaataccacaagcaagcttgtcaacaccagcagcaacgaatctcttagcgtcttcaactgatgctaattcaccaccatcagcaccttggttttcaccgatcttaccaatttcagcttcaactgaaataccacgttcgtgagccaacttgatgatttccttagtcttagctaagttttcttcagtatcaagcttgtgaccatcaaacataactgatgagtaaccaagagcgatacattccttagctgattcaaagtcaccgtggtccaagtttaagataactggaactgagatgttcattgaatccatttggtcagctaccatgtccttaacgaacttgtaaccacccatgtacttagcagcaccagttgatacttggatcaacaatggagttctagtttcttcagcagcacgtaattctgcacgagtccattccaagttgttagtgttgtaagcacctacagcgtaatggttcttacgagcatctttaaagatttgattaccgttgtcaaaataagccattaaaaaatacctcctaaatatcttacatgcctattgtaccctaataattgaaatatgaacaatttttcacagaatgtaagcgctattttcttattttcattgtttttctcttacatttctttaggagcattgacacctaacaatctaagtgattccgttaaaacgattgatgttgcttgaactaaggcgagacgagcaccaattttatcgtccttggttaaaatcttcacattagcatagtacttattgaattttttagctaaatctaaggcaaacttagctattactgaaggttcaaacttttcggcacttctagctacaattcttgggaaatctgctaaatctttggctacggcaaaagcccagtcatcatcaagagctagatcagtttcgctaggattttcacccatcgcagcagccttacgtaagacgctttgtgcccgagcattagtgtattgaacataaggaccagtatcgccttcaaaacgcacaacttcttctaggtcaaagtcaaaattgtctaaacgatcattcttcaaatcgtggaagacaacggcaccaacaccaacatcatgagcaacttgatcttgatctgctaaatctggattcttttcttgaatttgttttttagcaagtgaaacagcatcctttaatacttgatcgaggaagacaacgttaccttttctagtagataactttttaccaccttgggtgattaaaccaaatggtacgtggtgaatttcatcagcccagtcataacccatctttttcaaaacagtcttcaattcaacaaagtgttgggcttgctcgttacctacaacataaagcatcttaacgaagttatattctttcattctccattcagcagcggcgaggtcacgagttaagtaaattgaagtaccatcagatttaacgataatagcaggattttcaccttcacccatgtcaacaacttgcgcaccacgtgattcatgaagaagacctttttcttttaattcatcaattactggttgcatcttatcgttaaagaaagcttcaccattgtatgaatcaaaagttacgcctagttctttataaattcgcttgaagtcttttaatgaaacctcacggaaccatttccatagtttaactgcttctggatccccgtcttcaagtttcttgaaccattcacgaccttcattatcaagttcgggatttttctcagcttcttggtggaactttacatagtagtggaaaagattcataatcggatcttttttaacgtcttcttcattaccccagtgcttgtaggcagcaatcaacttaccaaattgagtaccatagtcacctaagtaattgattttaacaggagtatagccaaccttctccattgtcttagcaattgaattaccaattacagttgaacgaaggtggcccattgacattggcttagcaatgttaggactagacatatcaattggcacatttccttcaccaatcttttgatcaccgtaatgttctttttcagtcaaaacatccttcaaagtcgatgaaactaatttttcatggtcaatcgcaaagttaacgtaaggaccgactgcttggatattagcgaaattatcacttgataagttatccgcaatatttttagcaatttctgcaggatttttgtgcaaagtcttagccaaaataaatgctgggaaagcatagtctcccatcttagcatttttagggcgttcaattaatgcagcaattttttctttaggtaaatcaacttgactagcaaccaagtcaactacttcattcttaaagtccatcttattcctctcttctaaataaaaaagtctccttctacaaatgtagaaagagacgagttaaaaacccgcggtaccactcagattgatacaaagtatccgcttatttaaattcttgattttatcagtcaaacacgccttcattatcttctagtatctatcttgcaccaacatagactcgcttaaaaagaaaataactactacttttgacttcttggcaaacatgattatagcaggaaaaaacggcttctgccactaatttggttaaaaaaaccattcttgagttggattaaaatcttgaacgctttgaacaaagttttttactgcaattttttaaaaaacgttgcttaaaaagcaacgttcttgttaattatttttaatgattaccttcgtaccatctgggatgtgatccataatccacttagaatcaggtacactcaaacggatacaaccatgtgaaccttgagttcttcccaatttgactgcttcttttaagttatagctataatcagctttagttggcacagagtggaacaagtacacgttatcaggactccaactagtccaattattagctccttcacctaagttataattgaaaaagctgtctccacgaccattttggatcctaaaagttccagttggggtcaatgacttgcccttcttgtagattccaccagttgataacatggtatacaaaaccttgccttttcttaacaaataggtccggtttccttttaatgatacccgcaaagtcaaatccttttcatatggcttaatcttaggatattttttaggctcactctttttcttccaagtgcctgccttgcgcaagtccttaggatcgctatatggtcgatataaagcaccattatctacttttttagtttgttttttcttagttttatttattttcttagttttggccttagtctgcgttgtagcagcttcttgtgagacatcagacttaggtgcgcataccttagctaagccgataattgcaccaaaagctagaacgatactagttacgccgataataatgttttttttcataaatatgttaatcttcttttttattaatatttaactcaattatattatgctttttcgtctttgaagcgttaaaaaacatccctcaactagggatgcatttatttactattagaattttaacatgtttatgccaattctgaatactttttcatcaatttaggcaatactttagaaagttccgttggtcgtaccacataattatctttggcaagcaagtcacctgctaaagaatgaagatagacagcagcttgaacggtttcaacgcctgggccaaattgagcaaccatcccaccgatgattcctgctaaagtatcacccattccaccagtggccatgcctggattgccaattggattaacaaaaatttgaccagtcccattataaacatgagtatgattcgatttgagtactaaaagcgcattagtatctggaatcaattggtttaaagcatcaatactggcactatctgtttgaaacggaatacgaatttgactcaatcgttgccattccatttgatgcggcgtcaagattaagtggccagcattagttggcaataagttcttatcctgactaattaaatcaagagcactggcatctaagacaacggtttgtttttctgaagtacatcttcgcaagataactaaaatttgcttagcgagatcactcatgcctaatcctggcccgcaaactacaacatccatatttttgattaaatctgctaacttagcatcgcgccagttgataaacattgcttcaggcactcgtgcatgtaacggtgctaaattcaaagggtgtgttgcaacagcagtcaaacctgtgccagcattaatagcgccttcggtagacataataatagcgccaccatagttctcactaccaccgatcaagagtacacgaccgtaatcgcctttatgtgtatcgctttctctttctttaattacctttttcaagatatcttcagaaatttcagtcatatttatcttcctccgaaaatccagcgccaaattctgacaaaaaagttcaccttgttattagctgacaatgccttagccttgacgttcatcccattaggattagacaatgaaacaatcttttcattaccagatttaaattgataatcaccaactgtttgatctttcttaattggtgcttctacagattttttattcaatgatgccactaaagttttgccatcagctggatcccagatagtagtcttttgcttaagtcctaaattagtagttgcattatcaccatcaacaactttaattgtcttagcgccattcatttggctaccagcagtcattgttacaggacgatacttggtaaaaacataattcattaactttttagtttgttcaaatctagctggatccgttccgtcacggtgacgtgcgcccattactacagtcagtaaacgagcaccattgtgttgtacagttccgataaaacaagcccctgcagcatcagtagtccccgtctttaagccatcaactggataagcttgatcatattgagaaagcccctttaacatccagttaaagttagccatcttagttacgtgaccagcatctttaaagtttaagtgagctaagcgtgtagtttctaatacttctgggaatgccgagattaatttttgaccgacaatagccatatccttagctgacatcgtattttcagcatttttatttacaccaggatatgcatctttacctaaattgccattaggtaaaccacaagcagtataaatcttggcatcttcaatcccccacttttttacttgagctcgcatttgatcgataaatgccttttgtgagccagcaattgtttgaccaagcagcatagcagcaccattagctgattcaattaaggttgcttgataaagttgtcttatcgtatacgaatgtcctagttttaatggtacattcgaatattctgcattattagctacctttactatcggagccgttggctttactttctgatcccatgaaagcttatgattttttattgcttgcagagttaaataaactgttactaatttagtcatcgaagcaattggcaaagttttagtcgcatttttggcatacaaaatttgacctgaatcactatcaattgcaattgctgactttacatttagtttaacttgatcagcttgatagctactagttgtatctgcgctaactggtatagttgcaaataccgcaccacaagaaaaaattgatactgcagcaatcgtggtaattgctgcacgttttatttttttgctaaaaaacatgaatttccatccttttttataattaaagtattttatgcttacattttaccaaatatttggtatgattattcatgtaccaaagaaaattgcccgcttggcggaattggcagacgcgcagcgttcaggtcgctgttcaggtgactgagtgaaagttcgaatcttttagcgggcatcataattatgtgtaagtgttgagcaatcaacacttttttcatgcctttgctgtataatatatgtaaaagagatagaacagttagaaacgagttgattatcatgcaaaaaagacttacaaaatcacaaaataaaattttagctggcgttttgggcggtattgctaactactttgatctagatcctgcttgggttagaatcatcggtgctgcattgatattattcacaggtgtatttcctggcgttgccttatatattattgctgctatggttatgcctgaacctggtcaaagcgcacctaaggctgaaaagcacacagttgattatcaaactggtcgtcctaataccatgaatggtgacttcaccaagtctgacgatcaaaatcctgactcaactgagaaaaaggatgatcatgcagaataaatgaatgctataatataggtccttggcaggggcacaagttgatttcttcggaggtcaacttttttctcccaatttaatgtaatcgctttcataatacgcaattatgtggtacagtaacagtgtaagcaatgattgaattaaaagataaatattctaattatttatctcctagataaggagatgggcactatgattactatccttggaattacatttttggcacttgaattaattggagtcattacgttaacagcagttgaacataattaattctaaaatcttattacactcctaaaatttattgatatttataaaaaaggcactacagaaacaaatgatatgaaccccgaaattcggacaagaatttcgaggtttttattatgactaaattatccaaacaagacaaaattgatatttacaataattggaaaaattataatatatcagctaacctagctgctaaggaatatggggtaaatcgtacaaatttgttttatctgattgccttaatagaacgtcatgggatagaaattcttgataatagctataaagattactcagttgaatttaaagagaaagccatcaaaagagttatttatgatcatgaaacggctcgtcaggtatcattggatttaggactgcccagccaaggtatgcttcacaattggattcgcaaatataaagaagacgggtataatgtcattaatcacaagaaaggcagacctacccatgaaggacaaagacaaacagattcaagagcttcagaagcaaataaaagacctcaaacagaagaacttaagacttactgtcgagaacgaatttgtaaaaaaattgagcgccttagtctccccaagaaccgaaaaccaacagcacaagagatagtttctgcggttacgcaactaaggcaagaactccacgtaaccgttaagtttgtgcttgatacgattaactccaatcctgatcttccgcatttatcacgcagtaattattactacactttaactaaagatgataaagatttaaaaaacgaaaagattatggaacggatcaaagaaatatttgaggagcacaagcatagatatggctatcgtagaattactgcccaattgcgacgtgaaggcattatagttaatcataaacgtgttaaacgattaatgaccaagatgcatctatatgccattgcaattagacgcagatttaaatattcaagctacaaagggactgttggaaaaatcaagcccaatttaattaaacgaaattttaaagcaattattcctgatagacattggtactcagatattactgaatttcaccttaatggagagaagctttatctgtcgcctattatggatggatgtacgcaagagattgttgcttatacattaaatcgtcatccggtactaaaacaagtaatggacatgctggatcaagcttatcaaaagcatcctgcactcaatgggttaatttttcatactgatcagggctggcaatatcagcacgctgttttccaagcttggcttaaaaatcatggtgtttcccagtctatgtcacgtaaaggaaattcattagatgatggcttaatggagggcttctttggcattcttaaacgaaaaatgttctatggctttgaaaagacattcaaaaccatgggtgaattagaacaagcaatcaaggaatacattcattactacaatcatgatagaattaaaacagtactaaaaaaccggctctataatttttgtactgagacgtaaaaagtagacaattaaaatattggattaatagaggcttgacttcgatactctttcggggttaagccttttaatctgctctttatcctttcgttgttatagtattcgatatattcctcgattgcttgagttaattcttgaagattatgatacttgtattcttgatcatagaacatttcagttttgagcaggccaaagaagttctccattagcccatcatccatggagttgccctttctggacatgctttgagtaataccatggagttttaaagctcgctgataacgagggctttgatactgacagccctgatcagtatgaaaaatgcagttattaagagctgtttctttggcaaaagccttgtcaagcattgtcattactaaatccatatctggatgtttggagatagtataagaaactatatcgccaccgcagccgtctagaataggcgataagtaaagcttttcattattaagatgaaattcagtgatatcagtataccattttgtgttaggcagggctgcgaagaaatcacgatgaattaaatttggagctattttgccaatagtacctttatagcttgaatatttgcgcttattgcgcctgatgcctttaagacctaatttatgcatccaatagcgaacggttttctccgtaactttccagccctctctgattaactgcaaagctactctgcgatatccatagcggccttgatgatgattaaaaatctcatggattctagcaataagctttgaccgtttaggcttgacgggctgtcgtttgataatcttgtagtatgagcttctggcaattataggtagctcagggtgctctacaatcgcagctaatacataatttaaactaactttgaattcttgccttagatccgtaatcaccctagctatttcttctgatcttcttggtccaaggcacttagtttttttacgtattcgttcacaatacgcaatcgcaagttttcttctttcagctgctggatctctttctccagtttcttgcgagatttctgcttttctttggtcacgggcagggcgtcctttctgtttgataatgacattatacccgtttttcttatattctctaatccaattgttaagcatgccaatacttttaaaccccagttccaaagacagctgtaagtatggtttattgccaaagattgcttgttcaatagttcgctgcttaaactctttggaatagctttggtttttagtagttaaaatttctattccatgcatatcaattaatctaagcatatagtctaaattagctagattcattctgtacgctttagccaattgactgattgagatattttcatctttccatttatgataaatttctattttttgttctttattaaatttagacatagtaaacattctaagctaaatagtgaattagttatccgacgggataattgattcactatttttattcttttgtagaattaaagtagtggtaaaacgatatgccctgaggtctttagacacttgatgtcgcataataaactggcagttttacttaagttttcaatagtctcttcgaagaatgtggacactagatgtcgagtttagaaaattagatctgatttcttaagtaaatacgttttactactaagttttggaggtttttattatgcaagttacttttggaattgatgtaagcaagtctacttctactgtttgtgaactaattggtgaaagcaaaaatgaactaaccattactaataatcgtcctggttttattcaattgcttcatgaattaaccgctttttctaaacatccgcaaattatttttgaagctaccggtgtttattcacgcagactgcaggcttttcttgaagactacggctatgaatatgttgttattaatccgcttaaagccaaaaaagagatgaatatggggctacgctacaacaagaccgataaaactgatgcttatcatttagctttaattcaaagactttatcgccatccggttaatcaaagcgaatcccaaacttataagcagcttaatgctttgagccgcttctatgaccagctgacaagtgacttggtaatagctaaaaatcgacttcaccaagctctacaatcgacttttcctgaaattgaaaatttattttcttctgctaaaggtaaaaattactggcaaatagttgtgcgatatcctcattgtgacttagtaagaagagaagataaaaaacagcttattaactggttaatgagcttaaaggggattgcttttaaacacgctctaaggactgcagataaattaattgaattagcttatcaagcttatccagttgtatcttgctctagcatagaagtcgagcaagtgcagtattatgcacacagattgcttaatttaagtgatcaaagagaaaatttaatcgcaagaatggttaagttagcgaagtctttgcctaatcatgatttagaaaacctagaaagcattccaggctttgcacagaccactgctgtcagagttttagcagagttaggagatttacgcagatttagtaatcctaataaaatcaatgcttttatcggaattgatccaggcagatatcagtcaggagaaatggactctaatttaagtattactaaacatggcaatgcagtcgcacgtaagttgctttatcgagctattggacaaattgataatgcagctaagacaaatccgtgtcatatagcagattattatgaaagcaaaaagctatcctctcaaaccaaagggttcaaaaagatagctattgcttcaattcataaactaatcagaaccatttatgccctgattatcaatgatcaaccatatgattacaacgtagccacacataatcaaaaagactttagtcgtaattaattgatcaagtacattataacgctaagcccaaaaatcagatatggatctgggcttatttgtcgtgtctaactaaaaaaataaatcgacactaaaagatgtttaagttgaaatttaaacaaaaaatgaagccaaacttcttattatgcttgactttacgtagaaaaagacctaaaagtgtctaacttttagaaactgtcaaatcttttgtgtaaatagttctttctcgtaaattgattttttaattatttatttaatcaaagtaggattctaaggtgtcctgaacctgaccaaagcctttatgaattcgattgaaataacggtcattgtagctcattgcctgaataccaataaaagcatcaagcgactgttcagttggaaactctgccttaggcttagctttgcgcttgatcacattgttaaatgattcaatcatgttagtcgaataaattgaagctctgatctgcttgggatagttataaaagaccagcagatctggttctatgtctttcaagcttctgataacatggctgtaaaccttgccccatttggtatagaagtcatgcaggacagctgtggcttcttctttgtttgtctgttgatgcacctgtttgaattcgttcatgatcttttcacgatcgtcgacgcgtactttagcgcagatattgcgcatgacatgaaccaaacagcgttgaaaatgagctttaggataagtcctggccaaggctgttttcatgccaacaacaccatcagaaagaaagagttcaacttgcttcaagcctctggacttcatgttttgaagcatctctgtccagacttcaatgttctcactaggagcaatgcagtagtcaatgacttccttatgtccattaggtttaatgccaatggcaatatagactgcttcacgctcaaacgtttctcggcgcaaaggaaggtatgtcgcatccaaatagacgcagaaaaacttgtcgcttagcttgcgtttgtggtaagcctcaacctttggaatcatctgcttggaaatatttgatacctgagctggactgtaatggctgccatacatcttttcaattagatcggctatttccctggtggtcacgcccttggagtaaagcttgataatcatgctttccaagatatccgagtgctgcttgtagtcaggcagcgtgtgctgatgaaattgaccgttgcgatcccgaggcacttgcacttcaattgggccaaattgcgtatcaactttgcggaaataagcaccatttctagagttgccagtattccagccatttctggcatagggatcatagcccagaaaggcagtcaattcagcttctagcaagttattaacagcctgttgtagttctttgcgcaataaatcatttattttgtctggattgaatagagcttgagcaaaatctttggtaaaatcattcatgaaggagttcttctttctgtatgtgttttttttgttcaaaccaatcatacgagaaaggaactcctttttctaatgtttaaagaaataaatttaaggaatcattcatccttacacaaactattttacagtctcaacttttaggtctcagtttattttagttatttaaatgactttttttgcttattatatggcgctttttattaattcattgtgtaatttttacattaatcgaatcctaaaaaaagtggctataatatctgttcacctttaatcataagattttacgtatatattgtatagttctaaattacactttatatacacttagcccatgattatgtctatgttatttaaatagagctcttattttctttcgacacctttatcatagatcaaataagcaattttggctgtataatttgtcttcatgctttaaagctgggaagaccacggtaaaggttgagcccttgcccagttcactttcaaggcggatcgtcccatggcactgctgtactgcgtgcttgacgatggacagaccaagtcccgtcccgccagtcttgcggttgtgggacttgtcgactcggtagaaccgttcaaagatgcggttttgcgcttcaagcggaatcccgatccccgtgtcagaaacccgcaaaatagcttgcccccgcacttccttgaccgcaatcttgacctggccgccaggattgttgtagcgaatggcgttgtcgatcaggttgtaggcaatttcataaaccaagcggaagttggccttgatttctgtatcggccaaagccgccttcagctcaatctcgtgcttgtcagctgacgcctgcaaggcttcgatcgcctcggtcaccggactcttcaggttcatccggacctcttcaaattccggattttcgtccaggtgagacagccggataatgtcatcgatcaaggtcaagagctgagctgaagattcatggatcttccggtaaaaggctggccgatcgtcttccttgaccaggttgttttccaaaagctccgctgaccccatgatggactgcagcggcgtcttcaattcatgggacacattggccgtgaattcgcgccggacctgctcttcatggtattcttctgtgacgtcaacgaccaagatcgaagtcccttttaagaccttccgtgaaaaaatcggactggcactaatttgaatgttgcgcccttctctttccacgatcccttcggtgtggacggtccgcttgtcttgatcgatgatctttttaacatcatctggcaaaacttcagaagactttgatcctaagagcgatactaccgccggattggacaagaggacctggtcgttcaggtctatcaagatcaggccttcttgcatggcatcggtgaccgtcttgaactccttctcccggtggtggagctgctccatttggtcagcaatctgcttgttttgactgtcaagccgggttaacagcggcttgatttcttcatagctcttgctttcaagcggctggtccaggtctaactggttcagcggcttgacgatggactgcgagatcatcttagctacgaaccaagaagcaatcacggcgatcagcaagatgatcagcatcagcgtcagcaattgcaagatggtcatccagatcgaattccgcgtaaccgccacccgaataacgccgccgtctttcagctttttggcatagtacatcgtaaccgtcgacagggtcgtgctgtagcgctcgctttgcccttcgccctttttcatggcttcagcaacttctttgcgcttagcgtggttgcccatcttggctgggttttcctcgttgtcgtagagtaccttgcctttagcattgatccaggtaatctggtaattttctccttttagctgggttaagtacttccttcccccattgttgaccccgctggctgccaaatcggcctgcgaagccaaggtgttgacctcattgtgatcatagtcgatgcctaaaaaaagcgcactcaaaaccaccgagcagaccagcatgactgccgttgataaaaagactgcccgaaatatttttttaaacattaattcccttcatggtagcgataaccgaccccgcgcaccgtttcgatatggctaccagcctcactcaatgtttgtctcaaggttcttacgtgaacgtccaccgtgcgcgtttcaccgtaaaagcccgtttcccaaatttgatccataatttcttctcgggaaaaaacggtccctggatgggtgatcaagagcttcaagaggccgtactctttcaaggtcagctcgatttcctgaccatcgacataaacctcatgccgcttgagcaggatcttgatcccgtctttctcgatcttgtcttctttcttgtggttggtccggcgcaggaccgccttgacccgggagaccatttccatcatgccaaaaggcttggtcaagtaatcgtcagccccagaatccaggttcttcaccttgtcatattcggctgtcttagcactagcgatgatcaccggcaattcttcagttgacgagttgccacggagctttttcaaaatatcgctcccatcttcatctggcagcatcaggtccaagatgaccagatctggatgcttttccgccagggccttgacaaaagtcgtcccgtcttcaaagccacgcaccttaaagttcatcgactccagcgtatacatttcgatttcgcgaatgctttcgtcgtcttccacacaccatatttcagtcataaaaaaattctccctaatctatctgcaaatagctactctaattatagcttagaaacatttgctatgcagatagatcaggaagaatattaatttagcaaactttccaagacttatcttccggccttgccagttgccacaaacttggtccacttagcaacgttgaccgcgtggtcaccgatcttttccaagtacttggcaaccatcatcaggttgatcaggtattctggattgccatccttgctgaagttgttgatcaggatttctcgggcatggtcaaagtcatcgtcaacaatgtcgtcgcggtcgataaccgcttgcgccagttccagattcttggtggacaaggcggttacggcatcatcaaccatgctggttgaggtttgcaccatggacttaaggttcagctggtcattggcgatggacaggtgttcatttaacacgagttctgcaatatcagcagagatttccccaattctttccaggtcgtaaacggccttcaaagaagaactgatcacccgcaagtcagtcgcaactggctgctgctccatcaacaggcgcaagcagctgtcttcaattttccgttcgctcttgtggatgcggcggtgcaagttgactgagtcttcagcttcatggtagtcgcccgtaaacaaggtgttggttgcttccaaaatggcttcctggcacagcttgccgatgtcttccatggacttttgcaagttgtccaattcttcatcaaatcttgatctagtcattgtttctgcctttcttactctatctaattattactggtctttaaccgaaacgaccagtaatgtatctttcagttctttcatccttaggcatggagaagagttggtcagtttcaccgaattctaccaggtcacccagcaagaagaagccagtcttgtcagaaattctcacggcttgttgcatgttgtgggtaacgataacgatggtgtagtccttcttcagttgcagagccaattcttcaatctttgaagttgaaattgggtcaagggcactggttggttcgtccatcagcaagacttctggcttaacagccaaggcacgagcgatgcaaagacgttgttgctgaccaccagacagacccaaagcagacttgttcaaacggtccttcaagtcatcccagatagcagcttgctttaatgaggtttcaacgatttcgtcaagttcttgcttgtcggttacgccgtggatcttgggaccgtaagcaacgttgtcgtaaacgctcattgggaatggatttggtctttggaagaccatgccgactctctgtctcaaaacagtgacgtcaaggtcattgccataaatgtcggtaccatctaacttaactgaaccgtcaatccggcagccttcaaccaggtcgttcatccggttcaagcagcgaagcaaagtagacttaccacaaccagatggcccgatgaaagccgtgatttcattctttggaatgtgcatgttaaggtcatgcaaggcgtggaaatcactgtagtaaaggttcaagttttcgatagtaattttgtcttccattattaatttcctccgttattgcgcttacgcatcttgtctgaaatgcggcaggtaactaaagtaaagagcagtgcgagtactactaaaacagctgaagtaaagttggcaatttgggttgccttagggttcaaagccccttcagttctcatgacccagatgtgcagtgaaagagtttcaccacttctgaatggattcaaaggtgaagtaggtgaagtaatcttccagaagttgtgccagttgatgtaagtggattgaccagacgtgtacagcaaagcggcggcttcaccaaacccacgcccagcggccatgatgaccccagtcaagatttgcggcatagcagctggaatcaagacttttctaatggtttctgacttggttgcacctaaacctagagaaccttccttgtattcaattggcaaggcacgaattgcattgttggtttcagtagtgatcaaaggaattgacaaaattgagatcgtcaaggccccggccacgatgttccagctcattcccgtccacatgatgaaggccaggtagccgaacaaaccgattacgatggatggcagagaagaaagtgattcgatacttacttccagcatggtcaagagcttgccttccttggcgtattcagccaggtaaaccccagccccgatcccgattggcacggaaactaagagcgaaaggaaaactaagtaaagagtgttaaagaattggttgaagatcccgttgccggcagcccctaagaagtctgggctaaagcccttcaagccatcaaagataatggtaaatgtcaaatacagcaagaatgctagcatcagccagccgatggcgtaaaagacgccggtcataaaccgatcttttttcttagcacggttcattatttatccttctttccgttagccagtttgtgaatgagcacaatcaagacaattgagatgatgaacaagagcagcgccatggtccacagagccaggttgtattccccgccttgggcagtgttacccatgtcggctgcgatggcactcgtcaagttgctggttggtgacaaaaggtttgccgcaaatgagcgagtcttaccgataaccatggctacggctaaggcttcaccgatcgctctggccaagccaaggatcaccccggtcaagatgccgcctgaagctgctggcaaaacaactttgccgattacttgccagcgggttgcgcctaaaccgtaagcaccttcacggtagctcattggcactgacttaatggcgtcagcggaaaccgcggtgatggttgggaagatcatgatggccaaaacaatggatgcggccaaaactgagtacccacccatggctggatggaaaatatttttaatcaatggaaccagcttggtcatcccaaaccaaccataaacaacggatggaattgaaacgtagatttccgtagctggacggaagtacttttcaccgatctttggtgagatttccgtcatgtaaactgctgagccgatagcaaatggcaagcagataaccagggccagcaaacaggtttcaagagaacctacgatgtaaactgctgcaccgactttcccgccaaacaggccggtcttgtcaagcggtgcccagtcgctggtaaacaggaattcccagatgctgtggtgagccttgataaaggtttgactaccttggtagagcaggaatgcccccatcaagagcgtcaaagcaacaatcaagagcccgcaagcaatgtatactgcccgccagcgcttatcgctagcgatggctttttgaactaccttgtccatgaaaaatcactctccttttacttgtgttctttcttagccttgtctgaaagcttagaagcaacaccgtagcccatgccttcaacctttgattcgtattctttacttaacatcttctttaaaaaggccttaacagcagccttctttggttgacccttggtgtacatgtgctcgtagttccaaaccttgtatgagccgttgtaaacgttgtccagagttggcttaacgccgttgatggcaactgcagttacgtctgggttaccagtcaagtatgataaggcaacgtagccgacagccccttcaacgctttgaatcatttggatcaaagtaccggagtcgtcagtttccagtgattggtttgaacgactggcagtcttgtttaaagcatattgttcaaaagttgcccgggtacctgaagaagcaggacgtgagatcaaaacaatcttgcagtcattgccgccaacttggttccagttggtaaccttgccagtgtaaacatcgatcaattgctgggtggttaagctcttaaccccggcgtccttgttgacgattggggcaatcgcggtgatggccacttggtggtcaaccagcttggatgcggacttcttgtctaatttttcttctgcgaacaagtcagagtcaccgatgtcgatggttccatctgagacttgttgtaaaccttggcctgacccaccaccgttggtgttgatcacgctgtctggattttcatccatgaatgatttagctgcgctttggactagcggcaacagggctgaagaccccgcagcgttaacagtcccagagacacccttggtgtctgcctttgaactgccaacaacgcagccgacgactatagccagtagagcaagtgcgataaccactactctagttttcttgcctaacataattatcctccttgaattcttactaagtaaatagtaattaatggaggttaaatacattcagggggaaatgttaaatcaaagtaaaatacttaactttgtttaaattctggccggattttggaaaaatctttaccatttttcgaaaatcggttaatattctaacgttatttttcttagtttacattagcttaacaaagaaaaaaatgtaccgctttcacccttgctagttctatttaacatcggcttaacaatctttgaacctgatgcttttgttaattttttgtgagatatcacctgcgtgatgcattatgtaaccgattaaatctattcaaggctataaatagtgatatagttatgacatttgcttaagcagacaaaaagccagtggcatccactgacttttatctagctattcaattagttatttagttaaccgtggttgaccgcaaaggcgccgacccagaaggagacgacaaccaaaatcaagagcagccacaaaacaatctgccagatcaaggctagagtaatccaattcttcaaagggaccagattctcatccttgcgcttgataaagaggtagatggctggtgctaagccaaagattggccagacatatgcggcaaccagcagaaccaccatccaaatgttgtaaattggtgaatttgagtctttcattatctttcgctccttcactaattaagattttcccttatttctatcttaattatagcaatttacgctttattcttcactttctactacataatacctagcatgataatacattttttactggcttacttggcaatgtagacgtgttcgaagtagtaagagccgctgatcaaccagcaaggtgttttcagcctttgccagcagcttcatccacttgcctgagttgtagccattagtagaggtcatgcagtccaggaaggaaatttggtcggcaaagtccgcattccagccgctgatcgtggcttcaaagttaccagagtccatcttggcaaattgggacttggttggcaggctttgcaccttgacgtcgatttgcttgccaaaagttgattcaagagcactctggaagtattcgccgatggacttggacgtgtgccgtaatcaccgtaaaggacagcttctttaagccaagttccttcaacctttccttaaagtagctttgggccagctgcttgtggtggcccgttactagcaagctttccttggtttgagagaggtcggtaaaatccttgtcacccaccttggtcatgccagctgccgtaaagttcttagagcccgtgtagccgccgcccaaggtcttggctaaggcgtttctgtctagggccatggagatggcttgacgcatcttggtgctctggaacttcttcattttcaggttaaattggaagtaagtcgtcccgttggtctttcttacaacatagtctggtgacttttgcaggttcttggaggcttgtgagctcaggcttgccgtgtccagcttgccatcttggtagaggtagtaggccgttgacggagatttttccacggcaaagtggatgctttgcagcttaacggctttggcgttccagtagttcttgttcttgaacatggtccaggacaagttggagcccgtccagcccttttgcaagaatggcccgttataaacggtcgtttttgatgacgtaccgtactttgagccatacttttcaactgcggtctggttttctgggaaaaagactgagaaggccatcaaaagcttgaagtatggaatcttatgttccagactaacctgcagcttgtatttgccagcggctttcacgcccagcgtatcggccttctttttaccagcaacgatctggtcggcatttttaatcccagagaaaatgtagctgtattggctagctgtcttggggttcaccgtccgcttccaggaatagacaaagtccttggcagttacggtttcgccattagaccatttagtccccttcttaaggtcaaaagtccaggtcagaccgtctttgctgacagtcgtcttcttgaccagtaccttaaccggcttgctgtctttgcccagctggtagagcccttcagtcgtattttcaatctgctggaaggacgtggtgtcggtggctttggatgggtccatggtgatgattttcgcactggtcatccagtttaaattctgcttgacagatgctccttggctcttgccgcaggccgccagcatgctcccgcacataaaaataacagcaccagtcattaaagtcttacccttgttcatcttaatacctcattagctaacacgcataacaaaaaatcttcagttaacgatgccgccgataaaccgggtgtacttaatactgtgctgttaaattatctttgattcactttgtctaaaggacagttaaaacatgacgcggtttgctcttgcagcgacaccgctaagcctgattgtattaacagtcagattaatcatgctttttgcctcctttgctaaaaataattgtttttatacacatttcttgcgtttcttatgcattatataataacactaattatcgtctttgcaagagggagtggcagttttttgacaattagggttgattcacttagaaattgcacaaaaacttactcaagtaagccatcccccggccaaaaatttactcaactaccaggaaaaattagacttgacaccttatcagtaagatttgacaaagagccgcaattttttataacaaaaaaatcaaactgccatcacaacagtttgattttcttttatttatccatatgtagtctaactaaaatactttctaccttactacctaagacgctttggactaaccctgtcttcaatgtcaccaagccataaaagacaaccccagcacctacagctacaatcactagcaccaatgcattaaatctatgatcaggattgagaaacttgcctagtcccatttcacataatttaaccacaaggaacatgccaactgaaaatgctgtaactccagccagccttctactagttcgattcaaattaaaatcatactgcacttccaaatgttttaaagaaagtgccacaataattaataaacctaaattagtagcaaccagcggaccgtataccttaaataggaaaatcattggatattgcaggatcccttttaaaatcaatcctaaaaccaggtacttgatagccagtccatttcccgaaagaccttgcaaaatcgccatcagcaccgtaaataatcctaaactaatcgcggtaaatgacgacagatatagtacgttgctccccaatagatctggaccatagaaaactgtataaattggcctactgatggctgccatcccaaaagcagctggaatcattacaaataaaaataggtccatcgtattagcaatctgctttgaaatgctcttatagtctcccctagtatgcgccgctgataaaagtggaatcgcggttaccgccattgcactggccagcgaaacaataatcatgattaacttattagcattcaaaccaaacaaggcataccagtcctcaattgtatctgaactagcatgaactagactggcaatcatcgggtggaaggtatattggtcaaccaatgaaaataaggtaattcctgaatcaataataatgaaaggaattgcttgtgcaataatttcaccaaataattcagtcgttgagacccgcaagcgattattagaatgggcaaccaaataatctagttgttttcttctagaaaacaaaaaccaaattaataagccaattccaaataaagcaccaactgcagccgctaagtttgactgaataactgcatgaacatatgaaccatgttgcagtttcataattacaaacgccgttagcaacatccagactacccgggcaaactgttcaacaaactgtgacatcgcacttggcatcatatcggcataaccttggaaatagcctcgcatgatactcaaaattggaataattaaaatcgcataagacaagctacgcataactgcaacctgtcttggatcactttgactcccatttgaagctaaaagcggcgaagcaaaatacatgatcgcagctgagacaatacccaaaacggtcattaaaattaagcctttgcgaaataatttgcggccaatcccatattcgtttagtgcattatacttagctacctgcttagcaattgctcctggaattccggctgtcgagattaagataaaaattgtataaatgttataactacgcgcagtcaaagcattggcaatattgccgtaggagcccatccaggcataccacggaataatatacaaagcacccaaaattctcgaggcaattgagccaaaggtcatccatgcggaaccttttagaaaagtattttgtgtatctttgctatttaagttattttcttccattaaaattttcccaataaaagtctcaactaatcaattcaataaatctaaataataagtattcttattattttttaggaaaatctaacttatttagcaacaatattgacaatcttgtttggcacaacgataactttcttaacgtccttgccttccaagaacttctttacgtgttcaatttccattgcttgcttttgcaagtcatcttttgcagcgtctttaggagcttggaacttaccacgaagcttaccgttaacttgaaccataatttctacagttgactcaactaacttagctggatcataagttggccacttagcgtaagtaattgattcatcatgaccaaagacttgccaaatttcttccatcatatgtggagccactggagctaaaagcttaacaaagccttctgcgtattcccgtggaatggtcttagccttttgagcagcattcatgaagaccatcatttgactaattgcagtgttaaagtgtaatgattcaaagtcttcagttaccttcttgactgtttctgcataaaccttgtcaagttcaccatcattcttatcaacgattctttcttgtggaatggccttcaaatcaagatcgtttacaaagaggcgccacacacggtccaagaacttcttagttgaagcaggaccattgtcatcccagtcaattgatgcatcaagtggacccatgaacatttcgtacattctaagtgaatctgcaccatattcatcgatcacctcatcagggttaactacattacccttagacttagacatcttttcgtgattcttcaagattaagccttggttgtaaagcttctggaatggttccttagttggcacaacacccaaatcgtaaagaaccttgtgccagaatcttgcataaagaaggtgacgcacagcgtgttccgcaccaccgatgtaaagatcaactggaagccactttttaagcaaatcgtagtcagctaattccttatcattatgtggatcaacgtaacgcaagtagtaccagctagaaccagcccagttaggcatcgtattggtttcacgcttaccttttctaccgttttcgtcaacaacatttacccagtcagtcaagtcagcaagtggactttccggggtaccagatggcttaatgtcagttgcatgtggcaagcgaagtggtaattgatcttccggaactaatgaagtggttccatcttcccagtgaataactggaattggttcaccccagtaacgttgacggctgaagtcccagtcacgcaacttgtagttaaccttcttcttaccacagttatggtcttcaagccattcaatcatgcgctttttagcttcttcattatccaagccgtctaagaactcagaattgaagtgcttgccattacctgtgaaggcttccttttcaatatcgccaccttcaataactgggttaactggcaaaccaaacttagtagcaaaagcatagtcacgatcatcatgagctggaacagccataactgcaccagtgccgtagctagctaaaacgtagtcagaaatccaaactggcacttccttgccattaactgggttaattgcataggcaccagtgaagacaccagttttatctttgttcaaatcagttctttcaagatcagacttagattcaattttcttaatgtaagcatcaactgcttctttttgttcaggtgtggtaatttcttgaacaagcttgctttctggtgcaagaactgtatagctaacaccaaataaagtatcaggacgagtagtaaagacatcaaaagtcttgtcgctgtcttttaccttgaaagtaacttgcgcaccttcagaacgaccaatccagttacgctgcatttccttaacgggttctggccaatccaaatcatcaaggtcttctaataagcgatcggcatatgcagtcatcttaagcatccattgacgcatattcttacgatatactgggtagccaccacgttcagttttaccatcgataacttcttcattagccacaacagtacctaagtctggtgaccagttaacaggaacttcagcttcatatgccaagccctttttatacatttgttcaaaaacccattgcgtccacttgtagtaatttggatctgaagtggttacttcacggtcccaatcatatgagaagcccaacttgttcaattgacgcttaaagttagcaatgttgttcttagtaacaacttctggatcttcaccagtcttcaatgcatattgttcagttggtaaaccaaatgcatcccagcccattgggtgaagcacattatagccttgtgcacgcttcattcttgcaacaatatcagttgcggtatagccctctgggtgacctacgtgaagtcccttaccagatgggaatgggaacatgtccaatgcataataattcttcttatcagggtcagtacctgtcttaaaggtatcatgctttgaccaataatcttgccatttcttttcaactactttgtggttatacaagataaactctcctttactatcaaaaaacgccctatgaaaaaatcataggacgaatcatcgcggtaccacctaagtttcacaaaattgtgacacttaattgctccttaacgcggatggcaacgctaggttttattaagagacgagttcacaattttattctaagacttcgcaccaaccagtctctctctgaaaaaaatatccttgttactacttctcgacctttattttcttatagataatgattataatttaccacaaatgctataaatttcaagaggggagtacttttttgattaatacgaaacgaccacctaaggacaccttaatacctggtatctgcttcgtggttatttatgctgtctgggccgcactggtttcatccggctcacaatttattcacaattttgataatgctgtggtcaacattgtttgcaacaataatccagctaatgtcgcttttgctaaagattttactaatctcggcaatacaagcgtgatcacaattgaaacaatcattgttttcatagttttactggtctttaagcaatatgcatacgcttggtttaccgctggtgtcatgatctgtgctaatggctataattggattatcaaacacgcagcaatgcggcagcgtccaacggtcaagcacttagtttatgcggatggttatagttttccatcggggcactcagttggtagcgcggcgctatttggtgttttgattatcctaaccattcttttagtgagaagcaaattctggaagactttattgattattatttgggctttattcccactgatgattggttacaccagaattttcgtccacgtgcactatccatctgatgtattcggcggttggattgaaggaattacctttgtactgcttggttattccttcctctatcacttctacattgagccgaagatgatcgacatgaaacgaaaacaatagaaatcaaagcaatttaaaaggcatcgcatgatgcctttttctttatcctatttttgcttgtaaatgcgtcttttgaaaaattgaaattaggttttctaacgctggcgacttttccccgcttttgctagtaatgaaaaagacaacatccattaactttcgatctagtggcaacaagttaattggcgtttgttccattcttctgataatacttgccgaagaaatggtaatacccacgccgtgaattgccaagttagttgcagtaataatactattagactccatcacaatatttttttcgagtcttaatctctgaaataagccattaacttgatgccggatagctgaaccaggtgaactcaacactaaaggctcctgcagtacctcttttagatcaagttcatccgaatttaagataaactttcctgcttggtaatatggtgaggctggcgaaatcactacgtaatagcgttcctcgccacccgcaaccacatctaaactcgagtcaagtgcttctggcgtctgaccaatataacaatccagctcgccattaagcagtcttctttcattttctctggggaaattttcaaatagctgaatcttgacgttggggttttcttgcaaaaattgcggcaaaatttctggcaataaatatgtacctaagctctccaaaatgccgattttaattatctgttggtcaggatgagtatatgcctccagcttgcgccctaattgctgcttattatatgaaacattctccaaatattgatagtaaattagacctgcaggagttaacgtatagggtctctcatctcggttgatgatcttagtgcctaattttttctcaattcgtccaattagctgcgttaaataaggctgggaaatatataattctttagctgctctggtaaagttactctcttttagcagaacatctaaaaaatgttgtaattcttcaggattattcatgatcaagcccccgttatctaaaaaatgatagcttcacagctatcattatatcttatcgactaggcgtttttcacaaagtctgctagttcttcttcagaaaattcattgccataatcttgttctaattcttgcaagatttgcttgggactgcgcttcatccttctaagcatgttaatcgttttatggattgctgcaacagttgcctcatgtatgccttcttccatgccaagctgctttgctgcttctgctacttcttctgtgttcatgacgtgttgcctccattcttcggttctacgataattgttcatcgactttttaattcgactgacgagttttccatttgaagttggcttgccttcaatcatgcgataaaggtcatcaagctcaggtctgatcttgccttttgttccctttgtgtttaaatatattatcgcagaatcgtcatttaattcaactgatgggtcttccttagcagtataaacaaaagtatatcgcttcaagccttttcctttgggatcaaacggcagaataaaaattacatatgcagcgtgcagctcgccatattcttgttttcgtcgtaaaaagccatcttccatcatcttgaacaggtattgcctggctcgtttatccatgtctgctttatgcgcgacctgcatttccacattgtaacgcctgcctctgctatccgtaatcaggacatcaagaatcgaaactttctcttcttggttaaaagcaatcctttcttgcgtgcatacagtgatatcttgaatgtccaaatgtggtagaacctcattcaaggacatacgatagatctctggatctctcataacattctgaaacatcaaatcatccgtaaaacctaatgcttcagacacatttagttctttctctttgctcatgcaaagtcctccttaaataatttgaggatatttatcctctattatttattacgcaaaaaagtcgcaaaattttttgggaagttagaaaagttactattatttttgttagtaagaattagaaatcatgggtttttattcgaaggtaaggaaaaaatgactccaaatagaaatacagacataccaatatttaaattgatatatctgtatttttttatactctatctttatttctgcgaagcgccagtaataacatcggtaacatgcttatcctcataagcagtattggcagcaattctaccaaaggtaaagatatctgctaaagaatttcctcctaaacggttaccggcatggataccaccagcattttcacccgctgaataaagaccagcgatgatttgaccgtccttatttaaaacatgagccttagtgtcgattactaagccacccatagtgtggtgaatagcaggtcttcttggtgtgacataaaatggcgcaacttcacactttagtcctaatacattcattactacaatcatgaaagaattaaaacagtactaaaaaaccatactccgatagaatatcgaaatatggttttaaataaagcagttcaataatatgtcccaaatttggggttcatatcaaatcaaactgaagtgattttttattctcttttattttcaattttagtgatagaagtcaaattgaccaatcgccattgtttctttaataccaccagtttcaagaaccgacttatcaatggtaatcttcttaagagttgctgcaaagtatcctttaaaagcatgccccattgccaatcctgcggcttctgaattacccaagttaactactacacctaagtcatggtaagcatatttatccggtctagtttgacccataattctgctcttaatatcttttgcagcgtagttagccattgaaagagccaattgaccagtgttaggatatggccatttcttaccaggaaccatgacgcttgaaacatcgcctaagacgtagatatcatcactttctggcgcggttaaatgatcaccaaccatgacccgaccacgacggttcttaaatccagatgcctcaattactggactgccactaaagcccatcatccagattctagtacctgccttaatttcttgcagctcagcattgtctttttcattagccattttatacaaaaccgaggtagaggttacttcattaacataagctggcttaataatttcgactttatttttcttaattgtgtttaaagcgtaatcaagcaatttaccttggaacattggcaaaagacgtggcgaaccatcaatcattctgatggtaatttcatctggttgggcgccagccatttgagctagttctgggcgaacctttgcaatggcatttcctaattcaattgcttgaaaacctgccccacaaattactactgacaggtgtttagaatcatggtcttggcgataagctttcatttcgacataaaggtggtcgcgaatagcttcagcttgttttacattgctcattggcaaagcattttcggttacacctttaatgcccatattgctcaaggtaaagcctaagccaacaacacaatagtcatatttaagtggagcatgatcctttaactcaactgttttatcagcaatattaactttttcaacttcatccgtaatcacagtagtcatcttcggattaattacatcattaatttcatatgacatcccagtgtagggaatttcaccagtagccacttcatataagcgaattgtttcgtagtggtatggattacggtcaactaagataatcttaacttgttcacgcaacttcttttgcaaagcgacaactgttttcaagccggcaaaaccagcacctaaaactacaactgttttcataattttcaacctctctaaaatagaattcctaaaaagtaagttattaagtaagtcagtgaaccaactagcaacgtttttactcctgtgataaatgtctctgtcttaacttgtttaccaattaagatcttgttctgcttataaacgaacggtacaattattactgttaaccaaaccgtcttaggagcaattcccaaaaacggtaggaggaagattactaaaaatgctaaaacatttttgatactaaaagcaatcaagccaccttttttaccaataaagtgaataattgtggtgcggtgattatcctcgtcctcttgggcatcgcataagttattagctagcattaaattagaaatccataatttatcagctaaagctaataagaagatacgaccgattgtgatccagttccaatcaaaagcttgaaaactattgatataaacactgagcagtacaatcatgaagcccattgtgaaaccagagaacaattcacctagtggcaagctggaaataggatgcggaccaaatgaatataaataaccaaccataaaacagaacaagcccatccacaatacaggcaagcctactttagcgactagatacaaacctaataaaattgcaataagactaaaggaaataattaatcccagaactaaattaggtgaaatattttctcgcccgataatgttagtcttctcttggtaattcttgctatctgcgtgataataatcacagtagttatcaaacatatctactaccatgttaaatagtagcattgcaatgaagaagactagggcaaatccccagttaacttggtgataataatacacgctgtagcacatccctaagaaaaagggaatgacactagcggtttttgctttaatctcaattaattctaaaaatacacttaatgacatcgatccacatcctttcaaaggatcactattctgttaactctattataaggaaatctatcatgaataactctcaaccttggcaaaaatatccacttattcgtaaaccgcttgaagaagttaatcaattaattcaggcaaccatccgcactccatattcagacttgcaagatgcactccttgaaatggctagtaacggtggtaaatatttacggcctagtttactaattttgtcagctcaaattgctagcaaaaaagaaactgtatcaaaacaaattattcaacttgcctcatcaatcgaaattttgcatatggcctaattaattcatgatgatatcattgacgattctgacgagcgccgcggtaaaattagcatccaagcccgttttggcaaagacaccgcagtttacgctggcgacttgctttttacgcacttttttgacctaattttgaacgccatttccgaacaagattacatgatcaaaaatgctcacacaatgcaccatttacttgctggtgaattaggccaaatggctgaacgttttaacctaagccaagatttcaacgactacttaactaatgttaaaggaaagacagctgcactttttcgtttagctgccgaagaaggaagccattttggcaatggagatgagcaaactactcaagctttagcctcctttggtgaaaatttaggcattgcttttcaaattgttgacgacattcttgattacactggcagtaagcacctgaacaagccaacgctagaagatttgactaccggcgtctactctctacctattctgctagctcttagcaaaaaggaattacgagagcaattagtaccgctacttgaaaaaaagcgacaaatgagcaaaaacgatatcgaacaaatccaaaagattttgctaaacagctcagtcattgaagaaactcatgccttagctgaacaatacactaatcgggcattagctaacttagcccaactgccgcaaactaatgcgaccgtcttgctcaaaaagatgacgcgtaaattagtcaatcgaacgctttagtctttgcgtcccaaatgaatcgcacctgcaccgtaagttaacttagtaaccgctactcgagtaaaaccattttgctcaagtagcttttttaattgctcagccgagagaaattctttacttgtttttgacaaatactggtagtccttgatattaccgtgtgtcaacttagcaaaatacggaaaaattttaaaataagcttgccagcccaatttaactaatgcattagtgggctgagacatttctaaaacagcaaattgtccgcccggcttaagtacgcggtagctttcctgaatcgtcttaacagcgtcagggacattacgcaggccaaaacaaatagttacacaatcaaagctattggccgcaaaaggtaaattcattgcatcccctgcaatcaactttatcttggactgcagctgcttttgacgaatctttttttgggcaatcttcagcatctcctggttaaaatctagaccagtcactaatttagcttttttagtcaaatcaatagttgaatcagcgctaccacaacacaaatctaagcaaatagaatttttatttaaatctaactgccgtaaaaatttcttacgccaactcttttgaatccctaaactaacaatattattcatcaaatcatacttaggtgcgaccctagtaaataggtcatgcacatcttgttctggcactttattcgttagcataatgaacctctataatcctaaatcagcctttttcaattcacgataacgcggctctgtctgccataatttttccggtgtaccctgcatattaatttgtccatcttcaataaaaattacttgatccatctgatcaattccttgcaagtggtgtgtaatccaaattaaagttttaccggataattccttaataaacatattaattacagcttgctccgtaattggatccaagccaactgttggctcatcaagtaagacaattggcgtattcttcagtaagattcgcgctaaggctaaacgatggcgttcaccacctgaaaagcgtaatcctgcctcatccaccttagtatcaaggccatccgttaatttttgcaccatctcggccaaacctactcggcgcaaaacgtcccatagctgctcatctgtggcatcttcattacctagccgcaaattattggcaatcgtggtattgaacaaatatggcgtttgattgatgatgctaaagtaattggacatttgatcgccaaacttgctggtatcaattccatttaaagttacgtgtcctttagctggtacccgatcacctctgagcaaggcagctaaagtacttttacccgcaccactacgacccaaaatagcaatcttttcaccatcatggatatttaagttgatcccatgcaaaacctctttattagtttgagggtaggcataatgcacatcagttaatactaaattaaacggtgcggttaatttgattggtttatgcttagtccgatcaggagctggcaaattattcaaacgcttaagcgaatctttgtagatattcgtctcttgagcagcagtcggcaaactggcaaaagcctcaacagtcgggaataatgccaaagcaaatgccgcaatccaattagtataataagttgaacgcccgccaaatctggcagcaccccaaattactaggctcacaattaccaacacccagaagatttgtaaaacaaagtcgcgccagcgatcaaattttttcatcttcgcgttgatttgcaaaaatttatcttgatcattgacatgcaaggccaagtattctttgctgcggccagacaaaatccagtcatctactcccatcacattatcagtcaaatcaacgtagagcttgtcttgaaccgttttttcatagctttgccgcgcaccattgattaagactgaccaaataggaatagcaaaaataatcaagaaaaacaggatcaacatccaaatgcccatcagtggggaaatgatgcctaagccaattacgataattgcatacaagccccaagctacaaacattggaaagatcgttcttaggtaaaagttttgaatatggctgacatcatcagacaaaagtcccagaatatttcctagctgatacttactattaaaaatagtcgcatcgcgctccaatgagtcataaagctgttgtctaaatttggaggtcattttgagcacccaattgtgactaaccagccgctcaaaataacggacagctggccgcgtaatcccaaatgctctagttaagacaattggcacatagattaacaaaatattttcaggtttagctgctgaacggctgattaaatagccagcacagaacatcaagcccccgccacagacgaaagttaaaatgcccagtgcaatcgccaaaatcaacgttttacgatatttttccaaatatgggcgaacccaacgatcattttttaatgctcttaaaaccggaatcttattgatcattgttttcacctctcattcctgccattaacttgcagaagtagccttgattttgctgcaattgctcataacttccttgctcaaccaattgaccgtgatccatcactagaatatagtccatttcttttaaccaatgcagtctgtgagtcgcaaagaagaccagtttattttgcattaatggcatcatccgcttctttaagtcaatttctgtttcgatatctaagtgagcagtcggctcatcgaagatcataatttttcgcttaggatccaaaaatgctctcgctaaggcaattctttgtgactgacctccagacaagacacgcttaccgcggccaatcaccgtatcaagtccgttaggcaaatcatttaacaaggcatccagacccatgatatgaatcgcctgcttaatttcatcatcacttgcctgcggattataaaaagcaatattttcacgcaagctcttagtaaaaacgtatggctcctgcggaatataggtcatttgacgctgccaagcaggaatattcatggtcgtagttttctgcccttgtagttcaatttgcacttgatccggagtcaaaaagccgctgagcaggttaattaaactagttttaccagatccgctcattccgataatgccaattttcttgaatccttggacttgtaatgaaaccggtccaatttcggttcccttttgataagtaaacttcaagttcttgatcttcaattgatcttgagctgaccaagtttttaaaggtaaatcattagttttttcctctggcagattaatcaattcgttgatccgcttaaaggcatttttaccattcaaggttgcatggaaatcccccgcaaaatctcgaattggcaaaaaataatctggcgccagaatcagaattcctaaagcaggaaaaagtgcaattttaccattcatcaagtcaaaaccaagaaaaacagcaatgattgcaatagacaaggtagtgaaaaagtctaaggcaaaagttgaaagcattgctacttttagcaccgccatcgtcttttttctaaaaccctcactcaagttaaaaattgacttggaatatcttttactcaggcctaaatacttcagcgtatcaattccccttaaagaatcaataaagttattagataaaacctgaaagttaccaaattgtttaattgctcgatcctgtgcagcatgacctaggataatcatgaataagacaattaaaggatacatgactagcagaatcacagctgatgtccagcttaaaaacagcatgccgacaaagattaaaactggcacaatcatcattgttaaaactttgctgtagattaacttaatgtattgcctgacctcatcaacaccatctagggacatagtaatcaaactaccggttccttgtttttgtactaaagcctgtccatcacgaaagactttatttaaaagctgctgtcttaattcttctgcaacccgaccggaatatttttctaacattgaatctctcagtgtgctgatcaattgtctggcgataaagcaagctgcaaaagtaattagtagtagccaatcgagaggttgacctgcccacaatttgcttaagactgacgctagtgccaaggcttgtcctactataaaaaaagcttgcagaatctcaagccaatgtcattaagttaagacattgacaattaagggtgcttttttagagatcgaatcatttggattcgatctctttttttgtataaaataaaggcgaaaagaccagccttttcgcctatcttatatattatatattttaaaccttcaaaattattgccagaaagatggtgttaattatgaaagcccttcataagaatattctagaacgtcttgatcaaattatcaataatactggggatcatattcacgattttattaataatcctcatgcttttaccaggaaacgcactttagatgcagcgacagtccttaaaactacaattaacatgcaaggtcagaatttaaacagtgaactctttagagcttttggcgaagatgcaactaaaaagaacgataaagtagttagtacttctgcctatgttcaacgcaaaagccagctttctcctgcttgttttaaacatattctgactgtttttaatcaaaatctatttaatattcaactttttgatcatcactaccgtttgtttgccattgatggctctgactttaatcaaatctggaatccgaaatcgaataacattgtacaagcttcttctcataaaaagaaaccctattgtcaaattcacgttaatgccttatatgatctattgaataatacctaccaggattgtatttttcagcctaaatcagaaatggatgaacgcaaagcggctgttcaaatgcttaaagctttgaattgtggtccatatattgtaacaatggatcgtggctacactagtttcaatatgattgaaaactgcaatcgcctgcctaactgtcattacataatacgaactaaggctggacaaggcggagttaaagaaataacgacattgcctgatcaagaatgtgatcgtgagatttcctgcctggtaactacttctaactattactacatcacgcataaagccagtgagaatattcaccatgtccagcatcattatcgccaatatattaagtatcgctctaaaaatacccaggatctaagctgggattttggcgagttatgcacaataaaatttcgagcctgcaaatttagaattaatgatgccaaatcaggcaaagaagaatgggaagttgtgctaaccaatcttgatcgaaaaaattatccgctaaaaagaattaaagagctttatcatctgcgttggggtattgagacctccttcaagaaattgaagtattctttaggcagtgtacagttccattccaaacaagataaatttattgaaatggaaatttatgcccatatgattatgtttaatgcaatcagtcaaattgatgcacaggcctatattccgcaaaagcattgcaagtatcaatatgccatcaatttcaagcaatcatgcttgattattcagagcatgtatttggcttcttctttaacgcaagattttgaacggatccttattcagatcagctattataccattccaattagaccaggccgcaaggacaagagaaatattaagcccaaatcagctgtatattatttatatcgcgtagcttaaaaaagcagaatctgtgctatgccttatttgttgtacgaaaaaagcaccaatttaaccaattaaatgttaaatcagtgctttaaaagtctaatattaattgtcaatgtcttaacttaatgacattgaatctcaagccctgcaagtttttttaagattgaaccagcgccatcaattttaaatagctgtttatcaatcattatttaacctctccgattcttggcattgaaatccgcttgcgaaaaatccaatatgcccagatggtgtaagccaagacacatggtaccaagatgcaagtagcaacagtcataacaatcaaagtgtagttagatgatgatgcactatgaatcaacaaatcatatttactgctgattgatgaaatcattactcttgggaataaaccacagaagattaaggcgaccaatgagatcaacgttaatccactgcaagttaaagccattccttgcttgttagtgaaagtagctacatgtgctgctacagagaaaccaacaattaatgctaagcatactaaagttgcaattggatgtactctcatgaagtcggtttggaaaatcaataataaagcaaagacaacttcaccgacgtagagtacccagtataaagcttgtgcatagttttgtgctctatctgaaataacgcccttagttttaatagtaatatagtttaagccgtgcaaatagcaaagaagtgttaaagcaataccaccaacgattgagaaccagttaaagtagtcaaagaagctagctgaaatattgcctttagcatcgattggcatccctttaatcattgagataaacattaccccaaagagaaaggtggccattacgctaccgatcgccattgcattatcccaaatatgcttttgatatggagcacattttgctctaaattcaaatgacacaccacgaataattaagccaactaagatcaataataaaattaaatagtaacctgagaataaggttgcataccagtatgggaatgatgcaaacattgcaccaccagcagtaatcaaccaaacttcattaccatcccaaactggtccgattgtcctaacaacttgatctctttcaggttcattatgagctaaagtcttcacggccattcctaccccaaagtcaaaaccatcaaggaagaagaagcctgagaacaatactccaattaagataaaccaaagtatttgtaaaaatgacattttaaatggccccctttgagaacggatcaactactttgcttgcctcttgagccttatcatattcatctggatcgttgtgcatgaagcgaacaaccaatgcaatcatgataattgctaaaatagtaaataagcagaagtaaacaatatttgatgttaaaagtgaagccactgaaacattcggtgaaacactttgatcaatagtaaataatccataaactgtccatggagcacggccaagttcggtaattaaccaaccggcagtgttagccaagaatggtgagaatgtaagaagtgcgaagatccataatagccaacgatggttataaagggtttctttattcttacgagtcatgattaaaccaacaattgccatcaagaataataatgcagcaaaaccacacattactctgaaggaccagaataaagtattaactggtacatagtagtccatcttgcgaccatcaatatgtgtaccatacttcttttcaagttctttgttaatttcttccataccttttacagaaccagtagtcttgtggtaagaaagaatacttaacatgtctggaatatcaattcccttaacttcatgggtctttggattagcaattgcaactaccgtccatggagccttttctccagttgtcttataaacagcttcagttgcggcgaacttcattggttgatcatgcaaagtatattgcatttgcatatcacccacagcaatttcaccagctgagaaaattaacattaagattaagcctaaacgcattgtcttacgatagatcttcttgttaatgtctgaaaggttacgtttcttcaatagttggaaagcagctaacccagtcaaaattgtagtaccagttaaaagtgcaccaacaattacgtgaccatattcatacattaattgtggattcttaagaagtgctccaaagtcagccatttcggcacgaccgttgcgtaaagcaaagccgacgggatgctgcatgaaggagtttgctgttaaaatccataatgcagaagtcattgtcccaaagacgatcatccatccaaagaataagtgtaatttcttccccactttatcccaagtaaacatccacaaaccaataaaggtagattcaataaagaatgacaacaatgcttcaaaagcaagtggagcaccaaagatgtcccccatgaatctagaataatcggaccaattcataccaaattggaattcttgaatgataccggttacaacaccgacggcaaaactcaataaaaagatattagcccaaaacttggtcatctttttatattcaggcttgcctgtatgaacatacattgattccataattgcgacaacgaatatcgtaccaattgaaaatggcacgaagaaaaagtgaaagatcgtcgtcatagcaaattggaatcttgctaaactagtaatatccatttttacgcccccataattcctactcgcattacaagtctctgccaaaaataacgttcgttattcagctcaatttaagtgtacagctacttagatttactttcaaggaggcaaataatgcgctttcaatagtgttatcttatttttaggccactttccatttataattatagcattgtcaaatatagatttattccaaccgcaaaaaaagtactaaaaaaggaccaaactggtcctttttttctttatttttattattttcatcatgaaaatatttttgattttttaaaatttatttagttgttattttatagattctacacttttaattgattagtcaaattttgcgtagttttcattttcatatttagttcttttaaatttggcgaaataagactcaaatatagcaagctagaagcaaagatttctgcaaatagtgaattaacagcgccgtaacgcaacaatttttcatttgatggtaacgcaattatagtatcagcaatatcctttaagggcgaattctgggcacgagttactgcaattattttagcttgattttctttcgcctgttttgccattagcagtggttcttgagttaatccactataagaaaaggtaattaaaatatcttctgtcttaatattagctacttgctctaaagcaatgtgcgaactttggacgaaagcagcatcttttccgctacgaattaatttgtaaaataaatcctgtgcggctaagccagatgcaccctctcctgctacataaatcttctgtgcggctcgcattaattgtaccgctgaagctagagattgatgatcaattgttttgccaatgtctgcaatatttttttctaaactaatctgtaatttgtaaagcacactggtcggctcatcattttcattaataattgtatccaccgtattatcttgcttgccaggtatttcttgtgcacaagctatttgaaaatctttaaagcctttgaaacccaattttctacaaaatcgaatcactgatgcgccacttgttttagtaatagcacctaattcctgcaagtttttacttaggaaaagagttgaatctttaaaataaacatcagcaatcaacttagaagttttattcaaattaggatatacatctgaaatcttatttgccaaattaagcataatatcacctttcttctatgtcagccttctaaaaatgattttcgtactcgaatcaataaaatcaagcaacttcacatactcaggtgaaataaaaccaatcacattactacgtgcttcaaaaggtaaatttgacttaatcagactaacttcaccactatatctttgagctaatttgttttgcattgtaatagtgcctttacgcctatttaaagtattacaaattggaatatcaggttttctaggcaaacttaagcgaatcagcttttctggcatgtcctttcttacttcaatcacttgatcatacagctgttgatattgtggcaatagcgaacattctatgtttaaaatattatctttttgataatctacaatataccgaagatttttgattgatgccttgctatcgccaataaacacatcatccacatttgcttcatgaattaattcaacagctgcaacgtaaggcgaaactccacgatgcttttctacagttggcaagccttcatatagtgggaaacgtttaagtgcatccccaggaacaaaagcttgagttcttaagccatagtcctttaacatccaattcttacgtttaaaatctgtccatcccatacctgtatctgtatgcggataaaaattatatgttaaagctaatttaccaaaatcaacccctgcatttctggcacgatctaaatagtccagtgacacaacacttgcatttaataaaataaagaaatttctttgtagctttttgattaaatcaaagtcatcaaaaccataatctaatcttaaggccttgaatcccttatcttttaaggcttcaaaatcgcctcctttaattcctagcttttccaatgtagccggagaaacatcaggaattacttcaagtcccaattcatcgcacaattcaaaaaatctcggtaatttttgatccagatctgaataatcttcttctggaatctgaagtgacgtaaaaacgtattttgcaccagcttgagctgcttttttcaaatagttttcatcataatcttggaaatatacagatattcctagcattttttcttctccgttaaaaataaaaatcattgtaatagttacaatgatttcaattacttctttaattttatcattcaggaaagacttcattaattcttgcttcatctattccaaagaaccatgttaaaacaaagccacctacataagaaattaacaaagcaatcaagaattcaacctgttgacctggctgcataattaacagtccaaataatccagataccccctgtgagacagtacctaaatggaataatgatgctgcaacaccaccgaaaccagcaccaagacaagccgtaataaatggacgtcctaatggtaaggtcacagcatacattaatggttcaccaactcctaaaatagctacaggaattgaactcataaccatatttttaaaacgcttatttttgctcttaagccaaagagcaaaaccagcaccaacttgaccacctccggccatcattaaaataggaagtaaatagttaattccatgagttggaccagtagggtcattcagcataacatgaattggcgttaaagcttgatgcaaaccaacagatactaatgctaagaaagttgacgataaaatataaccgccgaaccagcttaacttatcatataagaagtccatagccacgtaaataatattggttagccaaccaccaactggttgtaagaaaaccactgaaattaaaccacaaaagatcagggtgcaaagaggtgttaagaatgtatctaaagcattaggcataaactttctaatctgtctttctgtccatgcgataaagatccccataaacagtgcggtaagcaaaccaccaacaccagcaacatatggcttattagtgaatggcattgatactgccagtgaatttaaagggtacgcagcaaaacctgttaaatttaaacagaatacaccaccaattccacctagaattgcactacctttaaattctttagctgcattcatccctacaaagattggtaagaatgcaaatagtccccatcctattgttttaatagttaaataccaccaatcattggcaaaagcactaccagattgataatcaataacattgcagataccattgactaaacctgcagcaataattcctggaagtaaaggaataaaaacattagcaatatgatgcaatccacgttgtaaaggcttatcatgtttagctttttgtgccgctttatttttttgagctctagctttaacttcatctaatgtttcattggaatcatcgccgccttcttctccaagtggcacaccggctaatttactaaattcagttccaactttagtaacctttcccggtcccagtacaacttgtaaagtttcagactgaactactcctaaaactccattaagccgctttaactgatctaaattaatttttgaatcatctttaacactaatccgtagacgagtcatacatgaaataactgcggaaacgttgtctttaccaccaatatcattcaaaatgctactggctaattcactatctttgctcattttttacacctcctaatttaaattatctaatgcccattgataagcttgtggagctgctgaagtccaataagcccaattatggttgccaccgttgtctcttacaaacttaacactaatgtcatggtttttaagagttttcacaaagcgatcgacattttttactggaacggtagtatcacttgaagtagtctctacaaagaacttatctttctctgatttactattaatgtacctagttggaaatacactatcataaaatttccaatcccagttactttttccatcttgaaaagcatactgtgaagttttaattgggttgttattcggcaagcggtaccaaactgcaggagaaattagaacaccatttccaaaaatatctggatatttcaaagccaatctggcagcaccatatccacccattgagataccaccaatacctacatgtttaggattggtttctgtcttatacaatttattaatagtagggaccatgtcatcaacgatggcactttccatctgcatcccaccttgcttttgattaatataaaagctattaaagccatcaacaaaaactacgatcatctttttattacagcgatgaatttctccatcaagaatttgttgagaattaaatctttctagcaagtttctatgattaccatagattccatgcaacatatataaaacaggatatcttttactgctttttggattgtaacctgctggtaaatatacatcataattccaatccatatgtaattttttcgaatacatagttgttgtaacaacttgactcttatgaggtgtaacagccggagtagctgtagcctcttttttctgactgcatccagttaagcctgctcctaaaagtaaaactgaaagagcaactaataaaaaattgcgatgtttcattattctccctcccttacttattactaatattcattagcaaagtagtattatcaaaactcttttgaaaaagcaatcactaatatgcaatttttgtacaaatagaaataatatttcattattctttattagtaagcgcttacttaaatataaaaatatcacttttaagacatataatcaatgatttttgaaatttaatttcaaagtatagctaattatttaaaacttggctgacattgttattatttttttctaatagtttacttgcatcatcactatttaaccctgtttttgccataacaattgctaatcctacatttttatcagctttaagcaagacatctttcgcctgctctattgatacgttagtaactgacgtaataattctaattgctcgatttactagctttttattagtaggcaagacatcaatcataacattttgataaacttttccttgtttaatcattacgcccgttgaaatcgtatttaagatcatcttttgtgcagttcctgctttcattctagttgatccagtaattacttcaggccctactacagcttcaatagctatttctgcatgttttccaattaaactattattaacacaggcaattgaaattgtccctgcaccgattttttgtgcatagtctaatcctccaataacatatggagttcgaccactagcagctaatcctagaactacatctttactagttaaatttagcttacctaagtcttcagcagcaagtgattctgaatcttctgcaccttcaacagctaaatacattgcagttttaccgccagcaattaatcctattgcacgatcagggctaattccatacgttggtactaactctactgcatctaatatacctaatcttccactagtgccagctccaatatatattaatcgtccaccatcatggtatttcttagaagccatgtcaattgcctgagcaatttgctcctcctgagttcctactgcttcagcaactttctgatcttctttattaatagttttaaccatatctaaagttgacatattatcgatatgcatagttgcactgtttcttttctctgtagttaaatccttgatattcatattaatcattcctttcttttaatttttcgagaagctttcctgtagcctccatttcttgttttacctcacctaaatcacttgaaattgagcataaataaagcacatttgaaataaacatttgagcaaaagttgaatttatagcaccaactctcatcagcgattcatgatccggtaattttaaatttatatctgctaatttactcaaaggggattcggattttctagtcactgcaacaattggtgttttattttttttagcttgtttaactgcaagtaatagttcctgagtcaatccgctataagaaaaacatatcatgacatcttttggcgttgaatagtatattctctctaatgcaatgtggacatcatcattataaaaaaccgtttttccacttctaatgagtttataaaaaagatccttagcagaaaagcttgaagccccaataccagctatatacacagctcgactttttttaattaaggatacagctttttgtaaatccttgatatcaatagtcttagataaatcttcaaagttttgactcaaactaacccttaatttagtcataacttcatcagctttgtcatctttagttacaatcatatctattggcttaagttgtgactgtttgacagtactttgagctaaatcgatttgaaagtcctttaaccctttataatttaattgcttacaaaaacgaattactgatgctgcagatgtattagtataattccctatttctttagcatttttatttaacaaaatttttggattttcaagtaccgcatcagcaataatacgtgatgatttttttaactctgtataattctctaaaattctatctctaacattcatttaatcaccttgcttttaactctattttactttcatagaaataatatttcaatatatgtagatataataaaaatactgaaattaaatttccagtaaaaaagccacatgctctactttgcatgtggctccttcaacttaatttttcttcaattttcgatctcgatacaattgattcaatacaatcgagactacaataacaatcatagaaacaacgtaaacagcttttaacccgcctaacaaaacttgccgtaattgtggcactacattggcagccagacttttggcattttctgcagaaacaattttattcatcatttcttgattcaaccccgatctcttgcttaacccatgcgccaacatcgtattaaaagcaatcccgtagatagaaaccatcattgtctgtcccagatacttcatcagcgtattaaacgaagtggcaacgcctatgtcatccttaggtaccaaaacctgcgatctcacctgtgaagctgtcgtaattgccccaaaggcggtcccattaaaggcagcaataacacagaagacccagaatgatgtgtaaatcggcactaaaatcaaaaccaaatcggccacaactaaaaccaataacatataatcatatgtctttttaatcccccagcggcctagcatcccgccaattaagaacgaacctacaatccacattaatgaactaggcgttacagcaaaaccggctagagatggattagtaccattaataccttgcatccaggtaggaatgtaaaattcaaagccgattactacgccagaaatcaataacgtaatcaggttaattgcaaggaactccttatcttttaacatagtgagtggcattattggatcaactgcgcgcttttctgctctaaagaacataattatactaattaccactaaaacggctagagcggccattatggcgatattagtgtttgaacctaaatcttgtaagaaaaacatcaaagctagcaataaaattactaaccaaatggttccctgcaaatctaacttagacttagagctatgtttaggctcttgcaaacaaaaaattacgagcaaaaaggcaattattccaattggcacattgatgtagaaaacccagtgccaggatagatgctgaactataaagccacctaatagcggtgcaataactgatgctactccccaaaaaccagagttaagacctaacattttcgctcttttttgcagagcatataaatccgcaataatggtgatggcaactggctgaaccgcgccagaacctaatccctgaattactctgaataagataagctccaccatattttgtgcaagtccacacagcgatgagcctatgacaaacaacgcaattccaaacaaaaaaactggcttccgcccaatgctatccgccagttttccatataaaggagttgaaacggccgtcattagcaagaaaattgatataacccaattcataatctcgagcccatctaggtcagaaactatggttggcattgcagtagaaacaattgtcccttcaatggcagtcataaaagttgtcataaaaatcgcaagcgtgactataggcacgtttgtttttttcattcttttttactttctctttttatttattgcttatttttaatataatcaagcaaatcttgtgttttatcagtcttttcccatggcaaatcaacgtctgttctaccaaagtgaccgtatgcggccgtttgttcatagattggacgacgaaggtcaagcatcttaatgataccggctggacgaagatcaaaaacattgcgtactgcttcagttaacaaatcatcgtcaaccttaccagtacccgcagtatcaatcataattgaaactgggtgagctacaccaattgcataagccaattgaacttcacagcgataagcaaggccggcagccacaatatttttagcgacataacgagctgcataactagctgaacggtcaacctttgttggatccttacctgaaaatgcaccaccgccgtggcgagcgtaaccaccataggtatcaacgataatcttacgaccagttaaaccagaatcgccctttggacctccaataacaaaacgccctgacggattaatcaaaaacttagtcttttcatctaggtacttggccggaataacttccttaatgactaaatcaatcattgcccgatggatttcttcattagaaacttctgcatcagtttgagtagagataacaacagtatccactcttaatggcttattgtttccatcatattcaacagtgacttgagccttagcatccggacgaagccaatctaaagtatggtcttttctcaaagcagcaacacgtctcattaaacgatgagcaagcgaaattggtaatggcatgagttcaggtgtctctttaatcgcaaagccaaacatcaaaccttggtcaccagcaccaatttgatccaattcatcgttatcagacttgttttctctagtttcaagtgagtgatcaaccccaccagcaatatcaggtgattgctcatcgatgtcaaccatcacagcacagttattgccatcaaaacctaattctggacgatcatagccgatcttcaaaatagtcttccgcactacatcttgaatatcaacataagcgttggtagaaatttcaccaaagacaaaaaccatcccagtagttacgatcgtttcacaagctacgtgtgaattaggatccttctttaacatcgtatctaaaattgcatcagaaatctgatcagcaactttatccggatgtccttcagaaactgattctgaagtaaacaaacgtctttccatattagtccccctatatagacattggctattcggttacaaggcatcttcactaatcatagtgaatcctctcaggacttgaaccgataaaataataattttgcttgttcgttctttttgcataaaaaaagactaccgcggcggcggtagtcccgaacaatggaggatacagggctcgaacctgtgacctcctgcttgtaaggcagatgctctcccagctgagctaatcctccattagtgacccgtacgggatttgaacccatgttacggccgtgaaagggccgtgtcttaaccacttgaccaacgggtcatatctcttaatcaagagcactttattataataactaatcatgttttaaaagtcaagaactttttttatttatttttattagttattaccaccgtgatctctcaatcacaacgtttattatattacctgatagtccctaattatgcaatagttatttttaaaaaatttcaaataatttttgataattcgctttcatccagtaataataactaattccattaggcattgtttcccttacatcgagaactggaatattatgttgctctgctagtttaaccatgccactaactgtactacttgatgcttgaatattattaacaaagaaagcaatttttctagctttaattttgacttgcatctcatgaataacttgcgcactcggatccgtttcattttctacagcttcttcaaatgcctgattgccaatcttaaaatgacaccgttctagtgcataatcaaacacgggctcactaacataaaccggtttatcttcacgcccattaattttagcagcaattttctttatactatcaatcttttgcaaatagcttgcagcattagacttaaaatatgctgcatgttttggatcaattttacttgctgttttaactagataatcaacatactttttaggcatgtttaagttataccaaatatgaggattatccccctgttttaatcccatcaattgattaccaactttaaccacatgaatatcattagcattggctaaattagtcatccagtcatcatatcctagaccgttggcaataacaatattagcattagctacttctttggcagagccagtcgtaggctcaaaatcatgtggatctgtatcgccgttttttataatagcttgtacatgaccatgtttaccaactatatttttagcaatatctgcataaatattagtagaagttacaatattaactctatgcttagcagtattctcttctccctttgtcgaacaagcggaaaatgttatagctaatagagatattaaaaataaaaatggaattagttttcgtagcttcacgatatttcctccctttctccattatatatgaaaaattaggtagaaaaaaaggaactatgttaacatagttccaattcatatatatttacggaatgtgagggatttagtaatgatttttattaatttttaccgatttctactcctggatttatgcatttttagtttttactgatttttattaattttgaaactggagaccttttcggagacctctttaaaattttgaagctccaacgtctattttatgtaaaattcaagccgcccacatccaaactgtgagcggtttttattatgtcaacttaacatacatactataagctaaatcaattatagcacattatccttgaactttttcatagtacctagctaatcggtaaactctttcccatgctaccgtttttaaaggacttcgacctgatgagtaagatttaagtgtatttaaaggaatgccggtagctttacaaatgtcagccaatctatattttttacttgccatcaatgcttctgctttttctaaatcattcattatttccatgccttactataatcttcgtctttaaatatcgcagctaaacctccaatttgttgaagccttagcaattcgtccgcgtccattccaatatttttcataatccaagcgtctgacataccttcatcttttaattcttaaagcctatctgacccactaagtgactcaacgccttcaatgcggtatttaggacgcagtttccacttctttaactctttttctagattttgtttagtctgaaaaggaactataaaaagtacataatccgttttagaggaattaataagttcaacagccgttctagttttaccggttccgggctccataaagagcgcaccaacccgtaatttttctaactttttaattgccttcctttggttatcgtttaagggagtcatcgacttgcaccttcttcggggtcattttctttggtttgtgatatataacttcttcatccttatggtgcgttgctgcaaaatctgaatcgttaaaagcaccccatacttctttacttgtacaaattaattcgctattttgagtgaataatttgaatttcatatctgaaggaagaaaagcttctaaaaaccacatttttcttttaattaaagatttcggcagccacaacttatatagagaaggtgtcttaattaagaccgccttctttgtttccgttattatcttacttttttcaaaaattatcttagtcatttgagtataagcccattaatttaaatctgaaaaatcaataattcttgatttatacaatttagttatatcatcaaccaatctattaatgatggcattctcaccgtacacatcgttgtagtgctctaagaattcattatttaattgaagcaaaatcttagttttagtgaactcgtcgtttgtttctaccgcctttttgtagccgttgacaatgcgatcagcgtaagaagtggttgaagttactggatctataacttctttgcaatcatctaaaatgtgcttagcttcatcggtagttaaatagccaagaattgcactgcgtcctgtagcttcttcatttgtgtagaaaatgtaaaatcttttagtttcatcgtctgcacacattacagttttaccgtcatagttttcaatacttgcaataaaaccatcatcactattgttcaagcgctcagcaagctttaactgtgttttttgaacttctgcggcttctctgtcgccatctttttcatcttgtgcaatagacttctttaatacagtaataagatcgtttaaagttttgatactcattttttatacctcgttttttcgtatttaccttacatatatataatactacttttggtgtattttgcaacacttttttgtataaaaaaacactttttaaaagaataaaaaagcgatgcggattgttctgcatcgcttcacattactaaatattttatttttcaattgaaactaaacggtagcctagagctctatcaagtctaggatcatcttggttagctaataagctttcaagcttgtcatgaatttctttaaagttttcatcgtctaagtaggtattttggtttttaacagtatagtagcagatacggtttaaagcaatccactcagcgtatttgtgagctaagctccatgagctgtttaaatcatgcatttcaacttctaagtcttcgtcaactttagcaagtttaaggtccctgtattcgctgttttccatggtctttaaaatttcggctttttcatcttccgcgtttgccttcataacctttctagcaacattaatcactgaaaagataccgtcattacctttttgaacttgcgcaagttcttcaagggcattataggcttcgctatcgtcagcaaagataatgttttcgtcgtccaaaacatctttatcgtagaagatgtttgaaacagcaatgtctaggctcttacccttttgagtgtccatgttttctaaaaacttgttgattaaatctcttgatgtaaacttcattttttatacctcatatttcttctttgttttttgcttacatatatataataccacttttagtgttttttacaacacttttttgtagaaaaatacacttcttttcaaaactaataaaatttcctaatgttgaatatttgtttatgaacatagaacattaaatatttatttattggatagtaaacactgaatgtgtgtccgataaaacgcaaaaaagccacctcatagacttttgtctacaaggtggcttattgcacgatatttggagtttttcaactccttgtctacatatataaattttaatttttgcttttactactataacacgatatatgcgcggttacctgtcacatatacctgcttgccttcgtgtagctctttaattttaagaaatctgccaacgcgaccttgcacctcaactttggaattaagggctaggccgtagactttgccagcgtctgccttcggtgcatcaagagcatgcgtgtgtggcagaacaatcttagcaacagcatgcttgctgtcgttatatgcgatagggttagccttcacataaacggcacgaccatcgaaaaactgatttttgccaacttttacggcaccgttttccaatccgaacacctgccacatggaaccacacggttttagcttgtcgctttcccgcttgtccagtttggagcttgtgtaaacgtatgctccctttgaattggatactactgcgacagcaccgatattccactttacaacgggatgcagagacagcgattctccggtcttgtttgttgatttaggcttagaactacctgaatttgcctttaaatcgatcaagcagatattaccgtcaacgttataccctttatagttatcggtaaattgccagattgctacgccgtccattgatgggaagtaattaaagtcagcggaatcttgacgacccatgactttatatgaagctacccataaacaagttccgaatgactttacaattcgagctgtgttgagacggttacgcaatacataagcaccagcatatactagcggcttatatcctgcttctttgatcacttgcatagctgctatgacagcatcggtgtttgaaccgacagagccgttgacgtcgttgccgctgccctgctcccagtcgtcagcgatgtagctaccagctgggacgccataagccttagccttttctacggcatacttagcttctgcccgtgccaatgacacagagccagagtgtgtagcataaaagtagccgccggttaaaagcccatgagcaagtgaactcttgatttgagcttttgcctttgggttgatatagccagtgccctgtgtaagcttaatcaatgcaaatttaatgccggcgtagcttacgttttctgattggtagcttgcgacatcagcacccaaacttctttttgatacggttaagtttgacatctttttcaccgcctttcatttggtttcttttggcaatcgtttggttttcaaacgattttccaaaagattcaaaaacgtactcgttgtacgtcttatatctagtctttgtcatcagaatcatcaccgcttacaaaaccaattggttgagcattgtcatcttcatcttgtgtagccttttcttgatcagcttgcatttggtcatatgcgtgttggacagctcccttagctacggattcggtaaggggcttgttttccttttgtgcttggttcagcaaagcttcaaccgccttagctttcttttcagcacctgaaatgtcgagcgtagcggcttcacttactacgaacttggcaatctggtcaatggtcatgacttcctttggtaaaggcttttttgacttagaagcaaagaaatcaataccggtagaaacaccttgacagatagcaacaaagacaagaaatcccacaaaaagatattcattaagttggcttaaattcattagtcagtcaccttcttagctaaaaaagcagtagcatctggcttattttctacttgtggtgctggtgtagtgctttcagtatccttgaccattgaatcgtctttgattcctgcaaagtagcgaacccacttggtaacttccgccctgatgtcctgtggtgcatcgtcaacagttaaaacaccgtcttgcaccaaggcaacgtaatctaaaattctagtgtttggcttcattttcacttaactcctttctgagtttttcattttcattgagtagttttttgttttccgcgtttaaacgcttattctgttcaacaatgtaatctcggttattctccacgctatccatatcacttttcttaccgttttgcttaaaggtaaagtagcctaaaagcaaagcggacaaagccgatataatgctgtttaggtcgacatgcactatatcacccctaacgctttgaataatgccttgctgtccagataataaaggctataaccgccgtatttgacaaagcgttctggacaaactccatttcatgggcaaaaatcacgtgttcaatttcgattgatgaaattattgctagcagcaccacgacaagtgccaacaacacccctagaagcttattgttgttgtaccgtgaacaggtgtaaaccagcaacgcaatgcctacaatcatcattgaacaatctaagtaaacgttgttcatcatccacgctagttgtggtggataaaagaaaaatctgcggttaaggtaaaagcccaaacctttaccgaaaatcagcagactaatgatcacgtaaagtgagttattgttgaggcgttgcagtagttggcgcataagcttcgcctacaatcttttggtaattttcagctgataagaaaccttgtactactaggtccttcataccgttcttgtcatagatgccgaatttccagtccatacgatacatctctaaaaagtttgcttgaatttgttccattaaagtcatgatttatgtcctccttaactattgcttatcggttgcttgatccgctggcttagtatcagttgttgggttagctggtgtagcgttattagcatttgcgccaactgccttggttaccattgctaaggtcttttgcatagcaccaagaatttgattagtgttttgagtttgttcagtaaagctcttcatcaaagctaagttttgcctagatgattgagcttgaacttcttgcatatccttcaatgcttggtctaccttgtcgttagcttggtcaagttctacgctcttcttgtccaattcagccagcttttgtgtagtttcttgcaagataacggcttgattgttcttgtcgttctcgctccaatcagtggcgcccactgtccaaactgggtctttaaagctgtcagatggtctttcagcgtggacttgccatgggagcgccacacttgcttcatcgccaaaaactgggattactttgtgatgccaaacaggatccgcattgtcaggatctgacaagtagacaaagcctgtaagggttgggaactttgcctttaaagcctgttcttgttcagcaacgctgttttgatcttgtgtagcgttttcttctgcgcccgctactggtgcaacttgtgtgttttcatcagccattttattggctcctttctattaaaaaagcccacgggaactccccgtgagcaaggttaattttttgcataaaaaaagcactcaatgagtgctaatactataactgttcccttgataaatccttagtcatgatatccgatgctttgataaacgttacgtaaactccatcaccagtattaggattatttatccaatgatcaaagtcaacaagataatatggaatatgattttgatctaccacaacgccgctgatttcacccgtaggagctaagccgcctattccatccggtttattccatttaagcaaattactatcgatagaatatccattacaaccactaatggttgtttcatcagaccatcctactttatatttactgtaagttaccactctgccaattaattctatatttacataaccgacaataatttttgttgtagggtagtagtcttctttattaaacttcatgtgatctagcatacagccaccgcctttctggtggcggctctaagtacttggtataggtggattaacgggctaattaccccccctaagatttccgtacagtccgattttcgaacccatacaggaccataggtggtgctactatctccctcactgataattggcaaatccctatttctgccaactagatagccgtttttcgaagaagcgcatacgtccagttccagatctgcgttcattgaacagtaagtagtatttggaaaatccgtaaaaatggtacttatttgagctccttggggaattttgacctttttagggaacataagataatcatttttattgaagatcatcttttcaatcatagagccacctccctaagcaggtaaagaagtgatctaagtcgttgatacaaacgaataggaaggaatttacccccccaatttacggattcaacgtcacttgctgaaacgcaagacaaatatattggaaatgtgtctggcaaatcttcccattgcccattacgatttgcagttccagttattgcatagtaattgttagccgtgccaacacatctaaaggtagatctaccaattgaaatagcacttccattagcgccccctattactccgccttgtcttacggtcacagttgctggatgtgggctccatgttttaccattggcaacaattgaagtatcactatccgaaatttcaaaccacttttttgtattcaaaattagatggtctagcatgctttcaccttctttctattacttttcaatcatagccaaccgtgtaggcttctcattttcccaggcttgggcttgggcttcttgacttgctgggaagcgacgaccctctacgtagttgtccttaatgtaagttacattgttgattaaatcgttaatctgcttttgcttgttaacattgtcttcctttaaatcgttgatctgtctttgcaaatcgttgatcgttggactggaaatattaccgctagcatcaacgcgagctacctgtgcgccagtgctattgcgaattacaacggcattagagttatcgtcccccagctggataaccaggtctaagttgtcgttagcatcgttatctgcaaacagtctgacattatcagtagcgccactccatgttaacccgccaatgttaccgtcatgcgattcaactgcgcccgcgccattccagttgatagtactatgttccgccatgtctccaccagagttggacagtttgccgtttaattgtcccttggtccagttaacaatgtcttgacctgcattctgatccatcagaatctgattgccgccgtgtaggttttcttccgtcatcttagttgtagcgtttgcgttagcatcaaaaccacgggcaacagttgaggtaacgtttacgttgccgcttccgtcaggggttaagccattaacctttttcacaaattgaccgacattcaagccatcgaccttggatttgatcatgttagtaatgtcatcgttagacaacgtattacttggtgtaatgcgtgtccaggggaaccaggctttggtatctccacacatcccacgtgcaaaaataaccccactcatggcagaaactaaaatttgaatgatagtattagttttaccaacgtcattaattacttttaagaagctgttttgcaaaaataaggaggccaactgtggtctattagcaaaggtattcgcattcttcggcatgcgatataaaccggactcagtcagattgtttaaatctgtcactcctgctggaatgtccttaatgcggtcactgtcaacgatcaagtcaagaatgccgtccttgtcgggttcaacaaccgctccgtcgttgatctttgcacccttaaccttgcccgcttctgcaatttttgggtcatactccgctttaagcttcaaaatagctgcgtctaaatcttcatcataaactacgccaatttgctttacactgatgttaattttggcagctgcgccgagtttaaacgcaacgccaagcttgattagctgtgttgatgtgtgatctggcgaacctgctccaagtgttgcagtaccaatagctggaataattgcgactaaaatttcttctttgccgccatcaatggttgcgtaaagcccaatcgacttaaaattgatatcctcatttaaatcgtgatttgaaaatgcaaattcgatgtctacttgtttagtttctttatcaaccggtgagatgtcagccaccttaatgccggttgtcatcttttcgccagctaaagaggtcaaagccctaatttgttcatcggtcattccgcttaaatcttgcgtataaagtgcggctttggtataaaggatttcgcctttacccgatccgagttttgaaaacaaattacgccctatatctgtaactagcgcctgattcatttttttactagtcgttgtatccatagtttcctttctaattagctatcattttgtaagaaacgataaccaatggttttgcaccaatgtaagattcacatggttgttggtcttgccaacctgtccaccacgtagttgttacctgatgcatatttacgtcttccgctgttacagcggtagcaatatattctgtgttctgttgcgactcttcccagccagtccaccagctggaaccaacatcaatgtttaaatccgtttcatcaattgaagcggcaccaatgtactcggtagttgtaacatttacataaaaaacaatctcatcaatccagtaacccattgccaatagattttgaatgttctttatgataaatttttgcatttgaagtgtttgcacattgtcccacggtatttcgataccaacatgacgaaggccggttttatagactttaaattgttccggctttgcatctagggcagttcccagaattttaaccattgatggtattgtgccttgagccctagaaattaaaatgtgtaaaaaaatgatgaaacggaatgtttcatcatcatcactaattctataagctttgtaatcttgcccgattaaatcaagtgttgtgccttttgccttgtcaatgcttcgccagtctgcaattttttcgttttcatcactgatcttttcaagcagtgaattataactgtctagcagctggtaaaaaacggtatcttttttcttgttccagtggtcggctacttccgcgatcagctgatctgttgtctcataagccaattaaatcaacctccacattttcagggtcacaatgagcaaattcggaacgaccaattaaaatattttggtctgctaatttatctttagtactaccaattacaatggttgcatcatcaacaccgttaacgtcataggtaacagaataaagacgggtaaaattgaccctttgccccatttcaagggaattaatttcgtcgcaaatagcttgcttgatgtcatcaacccccgcatcactgttccagtcgtcattaattgaaacatcgacctttacgtaaatgttatgttgttgagcgtggttaaatttaacttctttaacctttcctgttgcatctggtgcttctttaacaattgagccagctaaggtgataccggccgcacatttatcaactaaagttttagcgatttcatcatcgttaccacctaaaacataaatgtgaactgaacattcgggattaccgtattcatccgtcttatacttgtcgttgtcaataaagccaacttgcttaacgccgttgaggttcattaatgccgatttaatacctagttctgtaggaccaggacgggcgacattttccataattaaacgttttctaaaggtttcatcgtcttcataatcttgcccgccgcctgcaggctgtgggttggttacagagataaagtcttcatctgggttggcaaacaaagtaattgtgttagctggtacattagtaaattcgccagtttcttcacattcaacgtttccagttccttgaaaagtaccatcatcttgctttgaagtgatgacatcctcggttaaatcaaacaccaagtcatcttctgtttcgaacttttcgccagcctgaattaaatactcgccttcggtcgttatcacaacttccgcatgagatggagcgtcaactttacgggtcaaactgatattgcccgctaatcggtctaatgctgaatttatagcggttgaatagaatccagaatagtaaatttgttcctgttgctgaattaaatcgtaagcagcatcactcattaaacgggcaaaaatacctagataggcattacttgttaacgcaatgtcatctccaagccgcgttcgaaaatcgtcttccacaccgtctaagatttctgcgaaacttggggcaatatagcctgtttcttttaaaccaaaatcagttgtcaacttgtaaccccccctctacttcaccaatatttgcggtggctctaaaattaatctgcatttttctttcaggcttcttgataaattcgatattatcaacggtttcaacttccggaacatttgcttcaatagccgctcgcatatcattctccgccgcttgtttattgaagtttttacctaaaaagctgctatagtctgcccccatttcggggtctagccgttgcatttcaccataccgaatttctagcgttgctttaattctttgagctatttcgtcaagaccgctagtcatttctaaatcgtgagtaatcggatcaatgactagatcatgattatcactcataaataaatctctagccatcgtcgtcacccttataaacagaaacgataattgagtcgtttgcatcatgcattctactggtatttggcgtaaaggtgtttcccgtaccgtcccagttatcaatgtcacggtccatagtaacggctatcactacagtgccaactctcatagacttctttttcggataatgttctaaaaaatgtgagttaacttctgggctactatcaacggctttaaaatccgacttaaacttatctaacaattcatcaagcctatagcaagattcggcaaccggaacatctaagtactgagccgatttagtgccatcgatccaattcgccagcggttgaatatctgcaatgtgttttttcttgtcgtaagttaaaactttagctaaaaaagcagattcaagacttctgctgaatcggtttttcaccttactaatgttttcataccatcgaattggaaccctatttttttgtttcatactgtcatctccttattttttagatttaccttttttcttgcctttacttttagattttgttttatgaccagccttagcttttgtaaccgccgcaatagtgcattgagtttgtggactttcgccatcaaaactatgctgtccatttttaacgacaaattttccttttaagaacctagaattcatgataataccggtattaacggtaacttctgggactaagggcgtaacaatttgccaagttgtcccgtttttatcatcatcgttttgcgatggaacttgaattaagtctttatcatcaatcacaaaccaagtatttttcttgctattaggattgacaattacgagcttgccacgttcataaaacatttccgattttgctaacttaacaaagtttttaattaaagttagcggcttgcctttagcggtaaaggattttttaattccttcatttttagctaaatcgattttagctattttgataccggcttgttccgctattccttcaattacttgcttataagtcgttccttttcggtaaactcggttagcaaaataagtcttattatcacggcttttaacccttttatttgtagtttttggtttaacccatacttttcgataagcccaatggtggactatatgtttctgcccttttttaggacctctcttgtaagtttcaacgaccgaggtactataacgctgattcttgtaatgacctttttcagtgattttaacggttttgtagtgattaacctttttattcttttttagctttagctttcgagcagctacattgctgtagtttgtgccttcagtaaaagttaaaactttactatcagttgtcccatcattgcttaatttacccgtattagagataaatccttcagctatttttttagggtctttaccccagttaaaatttatccagcagtgcatcccttttttataaaagtctttatgttgcttggttaaattgaaaatagttgttgtaaaagtagacgggacaggatcattagtaaacgggacttcaaacgtaaaaggataattatgttcgtaagtttcatcgttatatacgatttgcttgtgtcctttactatcaaccgccacaaattccatatgtggatctttagtaacgatcattagtaagacacttcctcatccgttaggtcgtcatcattttcgttagggtcataacctagcggtttaattgatgggtcttctgtttctgatccattcgggtcaacaacgtcaagatacaagcggacctcatatccaaatgttcccttgccttggtctgttgccttacccgtttcgtccatcgtgcgaatgtcaattcttggcaattcgggatcagggatatcaataccaactaattgaccaagcaaaagaggctcctgcgttagaagcctcttattgttatgccaaattgtaattgtgtagtaatccgcaacttcgttgtaatctactctcatatcataggtatcgcccacaagggttatttgaaagatataaggaatatttttaacatcaacatcaagataatttctcatctaaatcaccgcctacgcaacccgtattttattgccagggtagattaagttaggattcttaatgtggttgactcgtgccatccattgaacagaactgccgtatttcttagacaaagcccacaaggtatcgccagatttaatagtgatagcagtgtactttttatttcgattacctgcgacagatttagaagccttagacgactttctgtggtgcttactatcatttgaagtggtgatttttgcttgatagacaaattgaaaagtaagtgaaacttcaatgttatctcgaagattcttatagtcgttgttcatatttgcgattaagtaatgcttatagcagaagtcccctcgataggttaaccgaacatgcgaactattccattgactaagcatgtgccatttacggtatgaatcggctttatctttgccaacaatgatgcctgcaactgttgcgcctttactatttacacgagcatatgagctatatggtgcgccctcatcaaccggataagaagtaatgtttgaagaaacattttcactttcaccgtctgccggcgaaatataaataatttcacctttgccatccgaacggtaaatagcacatttaccttcattcttccagccggtgttgtgttccgcaatttccgccaatttgttacttaaatcgattctttgcgtaacaatacggtcgtacttgtctttcgcttttttataattgttttccgcttgctttttccttttgtttgcagcatcaacaagcttcaaacaattatcacgttttcggataagctttttctttttaatttgattcttttcaaaatgtgaatcgaagtcatagccctgcgcctttgaaaacatttttcggtaaacggcgctttcatgtttttgccgcttgtcccagtatttcatagagtcatgggctttttgttcagctgttctcttttttggcttagttgcttgaaccactaacatcaccttcatttctataagaaatcatcatcgtcacccgtatcatcgccaatatgatcaagaatgatatttaatttttgacgtacttgttgatctacctcagcgccaatcatttttgctaatttttgcaatttagcattgtcaccatcaacgtcaccgttaatattcacggttacttgaatgtcacctaaagccccgccagttcctcttactgggcgtactttcggcttagatgaagttagtggctttaatctttgccgcgtcttttcatttgagtagatgtgaaccggatctttgaattcagctaattctggaccatgttcaccaactaggaccttatcacctacggcgggctcgccgcctgtcgcataagcgtggttagcttgccagaatgaaacagcctttgcaactgagccgtaacggtcatggatataatccataatgcccataagttgggcgatagggttactcttaccaccatgcttagtgtagtaatgcaaattatagctttgcatttgtcctaaaccgtaagtaccacttgatgggtttaccgctctagggttccaaccagattcatgactaacgatgtagttaataccagcccaatctttttcaggaatatgagcctgtttcatccagtgagcatgatcgccagtagccttaccagccatcaagccactagtatcagtatctgctaaattgtcgtcaatccactttaaagcccttgagcctaactcacgctttgcaagtgcttgaagtgacttagaagcttgggcgctggccgattttttaaccgcgttatgcaaacctcgaacacggtagaaaccgtaacccatactcatatcatcagaaatttttgatacatgtgcccttggttcagtttcgttgaacatcgtgccggtacgtggattcttgataattccgacgtgcccagctgcacctgttccgtgtccaaaaattacaaggtcaccaggtaatgtcttagataaagatttacccaaatattgcgtacctgatgattcttgcattgctacagtagtacgtccgatgttaacaccaaaatgccgtaaggcttgcataaccatacctgaacagtcggataaggtcttgtttgccgcgccaagttgatatttaacaccactaaatgttgattcagcgtattttaagaacgcttcacgagttccgcccttaccattagctccgccaattgcgttattaatgacggtccacattgcattagaccaaggattacctaacttagttgatgaatttctagctaaattaatagagccttgtcgtaaatctgtaccacttgccttaatttttgaagtgtacatatcagcaaaactcttagcaggattattcccagctgtctcagcgatttttcttagtctgctatgacttacgccagagccttttgcaaaacgctgtaatccccaataatttgctaattcttgggtttgagaaccattgaggacagaatcacctttttcaagtggcaatatcctgttattccctcttggaatccaaatatcaccgctatttttgataattgcttcctgtcttggcccaattgtcgcatcattgaccattgccatggtattttgggacaaacgcccatttgaacctttagcgaacttaactggcttgatgactgacgtgttaccaccaaactgtccgagaacttgatcaattcccttaataccagaattaacctggtcaattgtatcgcccattgcggaatgggcgtacttgctcatgtgacccagttctttaccaaagccctttgcagtcgtagaagcaagatcaactacaccgtcatgcatcttgtccatttgtttatggacaccagtccgcatgttggtatattcgtttattgccccttttctgctcttctcagcttgttttgtggtagtgcctgtaatcttacgccaacttgaattgctcttcttggtgagctcgtcaagcgatttggacgacttagaagttatctgcttataatcggcagttactttcttagtagatttgcctaatccagtattgccgttagcatatcctttaagctttaaaccggcgcccagaccaccactcataactttagcggtatcacgtgcattaaggattttttcgcccgattggatatttgccaattgcggacccttagcgccaagcaaacgagcatggttggaataaggcttgtaagctaattcgggccccgcttcaccaactaatgaagcagtaccgttagcatgagcgcctaagtgagtcgagcggttaatgtcagcaatagtagtagcatgtgacttgctggcgtgatgtttaccaccttgtccgttttgcatggctttaacggatttgttagcacttgcaacactggtgctattttcaggtttctttgtcttccagtctttacctgacacaaaatcccaaacatttttgacactacttgcaataccgccaataactgagctaaacatgtctttaagaccggatagcattccagtaaccatgtcaatagctgattttgcaacgcccttcatatctttccaagctttgccccatttccagtggaaaatatcagatattgttctgacaacgccagacgatattttgacaatgcccttgatgttagacgttacaatctttacagccccacgaacaacaccaataccagttttaatgactgttgcgccttgtttaatagcaagctttaaagaagccatcaatcctgactttaagaagttcttgaaattcctaaaagctttgttacggttaagatcgcgccaatctcgaccaatgtcacgggtcatgctaccaaatgatcttttgacacttttaacagtgccaccaatcattttgcccataccagcatcatgccatgtagttttaatcgaccatgcggcttgcttgaaggttttaccgacagatttaccaaacttagtcttactaaatctgcgagccatgtcgccagcccatttgccggctacttgccctaaagtagagccaatagccgcaccagctggaccaccgagatatagtccgacaccgccaccgattgcggaacctatagatttaccgtaattttcaaacttctttttagggttctttgtggtaattgctttataaagatcaataccggagttaagggcgataccgccaacagcaagggcagttgcccctgtgcttgcagtaccacctaatttgccagctactttgctacctaatccggtttttgcgagtttaccaccaattaggttggagctgactttacctatagcagagcccaccccacctaaaagagatgggttagctgattcaccagcgccttttgccgctgttttggctacagtcttaccgccaatccccagcacattgccgactaatcttttagcaacaaaaccagtacttaaagcgccagtaattgcggtaatatagcccagcgtctttttaacaggcgcaggccatccttcaatagctcttaataccttattaacaaatttgagcatattggctaatccggggctatttgttgggcaaactgcatccccatatcttttagcaacatctttgtcttagataattgattctgcaaagatgacatatttttattagacaagtttgaaatgtagtttgtactgtctgccctgtttgccgctctcacattattagcaacgtcacgattatttctagtcaaaattaaagcgtcgttaaagccagtttgaccaaataattgtttaaagtcgccggtaacacgattagactttttgccttgcgttgctcggttaagcatattgaagaccgtaggtagttgctttagattacccgacttagtaaagaaatcagcgggtgataatcctaaatctcttaatgccgcagtcttggttttgcttttagaagcgccaactaaacttgaaacaatttgacgtaaaccagtaccagccgaggtaccttcttcaccgaagttggataaagtaccaagagctgcaagtgatgatgaaagtgattgtcctgtttggtggaggattgaaccagccatcttaaaggaattaccaaaaccaccttcaccgccaacttgaccagatgtcacgtcacctacataggccgccttgtttaagacttcccttgtgtagcgtgccatctttttagtactgttaccggctcgcttcttatacccgaactgttcaagcataggagcggcggcattaacaacggagttataatcttcttttgttgcttttgccgcttggacaaagtacttgtgcgccgctaagtcttgattaccagaataaccacgcctaattaattcttccgaaccttgagcaagtgaattctgatcgacgccgtactttaaagatagattgcggttttccctttgaatagccgccgtattctttttagcagtagcggcactatctccaccagtttgctgcaagttcttaattacgttgtattcatcagctagcttagtggcttcatcatttgcattcttaaaagccgccgcaactgggaccattgccgccgcaatgcctgttccaacggtaattaattttgaacccgcatcatgaagcaaattaaagcccgtagttgcacggtcgctggctgatctgttgttttttagcgtcccatttgtcttctcaacagcatcttttgccgtattgaagccacctgaagcggtgtttgcagaaacgccagccttccaaatggtgttagataaaccgcccatagttttagcggaaccaccgacgccagcaatcgaagactttaattttacatttgcatcaattagccgattagttgaattctttgtttcttctaaatgctttttaacggtagctgttgtttgaccactttcggtagccataccaccaagttgcttttttaagccagcaactgtacgacttgtctcctcaacggaatttttgtttctgttgaattgttcagtaaagtcaggagcctttaaacgatcaaagcgtttttctaaaaaaccgaggtcagaaataaactttctagttgttttttcagcttcttttagagagttatattcaacgtttgtattaattccaatccctaaatgctctatatcagccacgttttcagctactttctttaaaattcaggcaaaataaaaacccatcaatttaattgacaggcatcacctctatttatcaccgccgccaaacaattcaccgatatgatttgcttgactaatacttgttgtttctatatctcgttccactactttagccatgatcagcaattgatctggcgtagcattttttacaagccgttcaggaattccgtgcattatcaaacgcagagggagttcaacataatcggcttgtctttcaatttctctattacctagtttctgtctagagtttttcagtaagaaaattcaaaacagcttcggcggcttcataaagaccttcatgatcgttccaccacttaattgacttaatctttggttgaataatcacgtgcttcaaactttctctcagcaattccggacgattaattgcgccgaacgggttgcgggaatcttccagaatttcggttgcttcttcaactccagggaattgaagctttaactgatattcttgatcagtatcttcccgaatggttacggtcttagaaagagcagtcaaaggcgcgaccttacttgattccgcttcttccttaatcttcatttgttcttcgtgcgccttttcggcaagctttgcgttattgatttctttactcattattaagtctcctttaagttaatttgatttcatgaaagtctcttgaaaccttcgaattaatcgctataggtcatgttcgaagtttcttccttgttaagcattgtaataggccaattacggtcaccagcttgtgcgccgccttgcttatctggaatcttgtcaattgatgcataatgacaagaaatgtgtgatgttgtgtcaatgatgtcaactgtgaaaaattcatccttgttaaacaagtctaaaagataggcattgcaaggagatgtttcatctaatggcaatgtaaagcccgccatagtcttgttattgtgcgatttagtagctgatccttgtggatcaatcttgtacgtatttgcatcagttttatcagtaaccgtaaacatgctgttttctgaaaatccatacatcaatttgtcattgatcataatggtgcagtcattggcatcatattcacgcattttagatgttttaatctttgaaggcatttaaactcccctttctaattaagcagccatgatagtgtctgaatcgacagcgccattaacggtaatagtatgaatagcgcttgaagcatggtattcaaagctagtgccgtcatagaatctgtctgacaagtgttggcgtgattgctgactacgtggagtggtagtaacgctgaacattgggcgaccagtagtgtcgtcagtcatgatgattcccttgtcgtacgcttcattcaaaacttgtgttaagactgcacgaatcatggcaatgccttgagcttcatatggaatcttgccgttatcttgcaaaagcttctgcaagcggctttgacattcggtttgaacccacatcacaccgtgaagcaagtcaatatattcacctgataaggtagttccctctgaggtttgacctttgcccatcatttcttcataggcaatagcatgaatattgttaataccagccaattcttgactagttaagttttcaggcgtaatgccttcaagttgcttaaacttccaagtaattgagccaacatcgttaagagcaatgccaccgacaaaagcggcgtccattggctcattcaaatcgtgcttcaagccgatagtgtagttttgccccatcatttgggtaaacttggacaaatcttcagtttggagaactaagaagtgatctttgtttacttcaaagatgtttgacaattgaacggttgaatcgtcaattgtgttgtctacacatacgccaaaagtccagttgaagtaccagaaagccttcaaactatcgtaagcctttgacttgtcataatctaagacggctaagcggtctgagtgctttggctgagcaaagtaggctgtagcctttttgtaaacagccgaatcttctttgtagtcaactgccaccgcatcaaggttcttatattcacggtaaattgccccagtagctgggtcagtcttacgtaaaagcaaaccattcaagcggtcggtgtttgacaaagtatctggcaaagtttgagctggtgtcttttgtgcgcccttgtcgtctttgccagctgaatcaccgttagcagctgcagtagtagcatttaacagcaaaatattacctagccccttaattggttggggatgtaggacagtcataatgacgttcacatccatagggcggtcgtaaggggcgaccgtggttaatgttggcattaaagttcttcctttcttacgtttatttcttttcctgtcatttgattcatagccttaattgattcaatcgttgtttcattgaattcaaaattaaggtcttccggtttatagatagttccaacacggtaaatagaaaacgagcaatcgaaaccaaatctataaacgggtaattgcgtgccattatagaaatttcgagagcttgttcctgatacgttatgtggaatcacatgtgcttgtttaaaaaatcctctatatccgtaactgtgcgctaatgtcttgcgtaaatcattggccgtattcaaagcttcatacatgtcggttgcttgcacatcaatttgaagtcttacttccatgacatcagtttcgtctaaagtaacgtcacttccagggtctacccagtcataagtaataaacgggtaattgctacgcaaaccggcattcatttgcggatatacaccgcaatgatatttttgattaactacctggataagttggtatatcactaggtagttgtccatcattggtggcatttgggtttgtgtcatcctgatttactcccttcaattggtactcaaaaaagtgtggattcgtataaccttcataagatgatcgactagtaactttgtagtagccgccttgtgtcggaacattgaccacactttcaattggatatttattaattgataaccaaagtaaatcgccttgcacttctccgccgccgtctaactgggcgaagagttgagcaaggtgacttgacattggtaaaactggctcatgaagcttttcagcatcatcatcgcttaattgggaataatcagggtcatcagttgacgtgccaggatagcggggtttatagaattgccccgaactccaaactttaatgtctacaccgtacttgtgaatcattcttgctggattcattttgtgcattagatcaacccccttttctaaattggaactatcataaacttcacctgtctttgaagctcccctgtatcaaccaacgggttatctgagcctttacgctcgatagtcgctggtcggtttgttgggtgcttcaacttaattgatgacatagcaatatcggcagtacatgcaacacctaaacgatttagcaactgtttgccagtcgccacccctgctagaatgtcggcaatgtattgtcttactaattgcgtatattttcttttgttagctaaataagcctgccgaataaacggacgggctggtatttgtacaagtttactaagatagaaatatgctactaacttaccgtggtcgttcacgcacgctacacggtgccctttaggaataaacaagccttcaatgtcttttggaccttttccctgagggcaatccttagtaggaatccatagccattcaccatttttaggcttaattgtggctccgaattcgttagctcccacgattgttagtaatctactttcacgttttccaaaaaaaccaattacaacctgatgcgtttttaagtagtcaagttccttagttacttctggaatacggttataaccttcaattttcatcagtgttcgattattctaatttttacgggattgccgacataatcttggtacagcctccaatagagctgtccccatggagagcgttgtaaccacttcaagcggctggtatcagcatagtggttttccaaaacatcgactttttcgaaagtcattccgctacctgccccgtcttgcgttgctaaaaggtgtagtgtcatggcacgggtagccaactcaagggctggcatttccgcaccatgaagcttttttactttaggaaacccgtcagaaatagcaatcattcgggcgttttcaatcaacgcttctagtgattcatcgggtacgtcatcggtcatacctgcagtatcaagctttttaatcagccctactgtggtagttgtgtcattcatactacttagcctttgtcttagcttctgcccatgtttcagaaccatcattcaagccggttaactgaacaattgcggctgggaacttaactgacaagccgcctgaacgttccatgtacatttgtttgtagcttaatccgttgtcagcggatggaatggctgtgccgtaacggcatggttccattgcaataacaatttgtgcaacatcaggagtatcaaggtaaacaatacccatattctttttacctgcttgtccctttttgtcgttccaatactttgcttcaagctcggtaactggtttaattccagcaaaaacaccatcgctgttagctccgttacgttggatcatgttccataaagtcttgtctggattgtattggttaaccaacggacgggttaataattcgtactcctttggtggcaaagctaagtaaggcttaacgttgtggtagccaggcaacaaagtaatctttgaagcggcatccatgaagtaattgataatcttgtaagcatcactaaatgcgtccttgttgttagggtctactaccttttgcaaggttacgcttggatcatctaaagtttgataacctgcggtctcagcatcagtagttaaaccgtagataggtctttgtgaatcgccgttaccgttgaaaattaaagcgtcttcccagtttgctaatgcgtcatgggtagcagttgcacggtcggtaataatatcgatatttctaccgccggtgtgtgaacgctctaaatcagcttgtgaatattcgaatccagctgccttctctgcaacatagcctacttccctgtggtaagttacatcagtggtagtgatgtctgttgcacggtcggtgtagtctgatgcttggcccataatttctttccatgcccattcgtaagtaagtgcccatggatcgggaagcggttttagctggaacattgttctgccttgaagttcttctcgttttggttgtaaaacaaccggatcaacaacgttgaaaagttcactataggcagttcccgtattaaatcctgcttttggcattatttatcccccttcttatcggtaccggtagttgatgatgtgccggctgattgattagtagtacttggatcagttgttggtgttgatggcttgtctaccgtggcgcctgtgccagtagtacccatgtcagttaagttgacatctacgattgcggtaccattagcatcgcctgcagtgataaagcgaccaacaacgggctcacctggcttagctggtctaaaagtaccatcagcattaatagttgcttgatctaagcggtcaacgtcttcagtaattggaactgacacgctaccacggcgtaaagcgccaatcttttcacctttaagccagtggtcattttcgatgtcatcgtaactatgaccaattacgtaagcgcgcttaaccgaaattgcatagataggtgccttagttgctactacggcttgattgtcttgaatatcaagggcaacaccataatcgatattagtagcagcggtaacggtataaattgaataatcttttaaagaaccgatagttccgttacctaattctttcttttgataaagttgtccaactggtaatggcattattcgttacctccttcgtataagttttgacgtgcttcaagtgctttctctacggcagtcttttcgttcgaatcgccagcagtacggccataacttacgccaccagcattagtactaaataggccttcataaagaccacttacaaagtcgtcacttttatctgaataatcgtgttcgcctaaatttttattaagagcggcttcttcgacttcacgttcgctcttaccggcaaagtcatagctgtcaccaacaactttcttagctctttcacggaatgctaaggtcttgttgattctgtcttcgaatgcatcccctgcaagttgtgacttgagtttcttattttcttcttctgcgctgtcggcgcgtgagttagcttcatcagccttcttcttagcgtcggcggcttcctttttgttcttatcgccagagccttgtaactccttaatttgggaattaagtttgtcacgctccgcaataagcttttctaatttgctgttgctgtcgtcagcgtcaccaacaagcttcgttaacttgtcggcatcttcaacagcaacgctaatatcaccttgcttggtatgtacttttgtaaagtccatcttttcacctttctttttttcgttatcttcaggaatttcttctgcactatcagccgttagccttaccgagtgaccagcgcgaccacggtctacaatcgcaacatgattaattctgatattggtttgcttagcatcgtaggcttgcccattaagttcacctttagttggatcaagctgcatttgaaaaccaattgataattcttgcttgccgtgcctgattttgttgattaagtcactatcagttatggtcaaatcatttctgatagtcttggttgctttatcaacacgggcatgatcggacataaagcccttcataaatcgctgggaattatcacagttaaccatgattgtgttgccgtttgcgtcggttgggtggtcgtcagtaactggtttgttattggctgaatcaaccgtagcagctgagaacaattcctctggtgtcttagcttcttgaattcgttgcccatcgaattgacggtatggtcgtacgccctcacatgtgattggcacattcttgacgtgcagaaaccccgttattggatcgatagtaaatttatcgattggcgtagtagtttcatacctaattgcgcccataagctatgcaccgtaaggaacttcaaccggtttgttaggaatgtaaattgtttgaccttctttaaccttcatcgttgctttgttgatgtggttgaagtatctaagttgctgtaaagctacagagaacttttgagcgacatcaaacaaactttcatctttaccaatcacgtaaggcttagcgtcagaccaatcaaacattcctttagggtcctttgctggttcaaccggcttcataaccggtgaactggttggcttatcaataaccggcttggtagcactatttaaaagtgaacccgttaagggcttgcttgtactacctgctggtgtacttgttggtgtattatctgccatatttctggctcctttctgcataaaaaaagcacccttcatgagtgctaatcatctattactggcatcgcaacacaacggcaattaatcggctcacctggaagctgtccatcgtcaccgccatctggatcatcgtatctaaaaacttgttgatctagtatttggtgtttaggtctaacccgtccatcctccatggattgccatagatatttttcaaagcccgcatgtgtggcgcggtatttattcaactcggctaaaatactgcctgtttgatcgttagcaattagccgagcatggttatatgacatattcgtacgcttaacaattgcgttggttaattccgtggcacccttaccatcactaattgcgcggtaaatgtcgctttgcaattgggcgacgtacttatcccgcattgaagtgatgtacgaggtgttttccttaatctttgccttgataaacgcttgaatagtcggattgcttttaattgcttgtgatgaaattgccctagcttgcgcattgacattgctataagaaaaactatttactgacagtacaaattgagttgcaacattttcaagttcctgtttactattagaattctttatagccaatatcatcaacgcaatcaaagcggacaaccgctctattttgtgagggtcattttcatcatcatctgaatcaatcgacaacgctccgcctaacatgtaattcttcaaataatattctgcataccattgcgctttctttttccatgacaagacaagacgctttaaagcccccagatacgatttttccaagttcatggggtatcttgtctttgggattgttttacgtctccttgccatggttttttgctcccgtgaggtgtttttctatcttagccttttctttggcaaaagactttctatcttgttcggtaatgtcatcatcggcactatcgccagttaactgaattggaattgcttcgttagtagtttgttgaagtaaaatatcatgggcttcatcagtagtaagaaagccaccattaattgctgtggacaacgctgtggaaagcttaccaaggttatcaatcttttcactatcggtgagtgtctgcaaagagtagaactcgatgtgccaatctagtgagtcaggatcttctgaaccgccgcccacattttcggaccacatcagcaacttaaccagccactcaagttgcggcttaattgtctgctcttgaatagccctgatactatcgtagtaatttactacgtcctgtgaagcgccagccaatgtaccggcctgttcacccatcaaaatcgatttaggaatcccagttgcggtactaagttgttgccaagcaaaactaaatagtgaatcaataccgcccggcttatttgaaactttttccaggtcatcgtctttcccaacaactaccagtgactcggtacccatgccgcggctcattctgtgatcagttttgcgctggtcatcctcagacagatcaaaataagcatcgcttttccagactttcatgttgtactcgtaaagcattttgcctgttgagtacaaaccggtatcaagagttttaatctggtcatagcaccgcattagcaaagatgtacccgttgcatcgtcttccatcttgtccagcgaaatgtgtctatagcggctactgtcaattgtgatactttcaggctcttttgaattatcatctgagccatcagataggccctcaagtaccagcttttcttctttgccaaagttttctagcgttgggtcgttacaaatctggttagctttgacatgcatttgactaaaagcattgattgaatttacttttaaaatgttgtgcgggtctaatggctgttctaagctagttcggtgtttttcatcaacattaacgtttaaatatgcatctccaatgatatttctataaataatttcactagcaatcttttctttaggcaataatgcatctaaagccgcttgatagactacttgcttttcatcgttgttgttaatcactatccgccagccgtttcgagttgctgtttcagctggtaaacgggcgattcggttagctaaagcattagacttaaacagatggtcagcttgtttatagttgtattttctatctaaataccttgttgaaataaaagaagacgtatcaccgaatctgctgggtgttacgcctttactttcgtaatccataaagtcagcaccgattgtaatttgtgctggctttttctttttgccaaatccaaacaattaatgacctcctttctaaataaatccaagtgatattttccgtttatttttcattaggtacttaatcgcataagtggctgagtctacttggtcatcatgcggcatgttaggaaacccacaccattcttcaatcaattcttctgattcgggtttccatttagggtgcggtatatatacctgtcccgcttcgaagtacggtgaaacagaagcaaaacgggcttctttgctgtccgcccctggcgatactggcataattccaggtattttctttttcaaagtatcaagaattgcgggaccgtttgccttgtcttcaactaatttcgatgttgattctgggtaaagtgttgactggtacttaatagcttccagcgtttgtgtaaagcttaaccgcttgtggcaccaaccaggacgcagaaacacctccgcatcacgtcttgaccatgtttgacctgccacatagtcgtcattttctttagatttaaaggttgcatcccatgcttgaatggtttgctgcaagtgtcgtggcaaaattttgacttctttttcagttaagtgaagccgcgccatcgtctcacgatcaggaacatagaacttaatccactcacgcttaataatgttaccctcctgcaccgttggtgcctgctggtacatagcattaaatttttgagtacctaaattactcttctgggttagcagctgcttaattggatgcttttctgggtttaaggcttcaccattacgtctgcctatagcatcggtttgaccacttggtaaatcataagcaatagcaggaaacttaatttcttcccagtcaaagtccattttgtctagcagtctgccagctaaatcgtcggtactccacctagtcataattacgataatagaagcgttagcagatagacgggttgaaaatgttgaagtccattcttgccaaatattttcccttactgtaggcgattgtgcttcttttgcgtctttgatagggtcgtcaataatcaacaagtccgctggtcgaccagtaccaccaccttgaattgaagtaaaatacgcttcaccacggtgccctgcaacggtaaaatcattggaactatttttgccgatggtcaagccgaataatcggttagcccaatcagtgaaatgctgtctttctttgcaggcaaaacgagtatacatatcttcaccatatgacgttaccattacctgattttcagggtatttcatcaggtaatagctggcgaaagtctcagtcacacacatactttttccgtgttgtggtggaagttccagtatcaaatgtttctgcttaccatcaattatttcttgaagcttgccacaaatatactcgatgtaatcataaagcttggcgttaatatcagaattagccaataaaaaataataggcgtagcttctgcgtgctagttcttccctagccgctaacgctataccttgcctttgttcattagtcaattccactgatatcaactccttggtctaaatttgctaaacgctttaaggtatccatgtctaacttgctcatgctatctcttgccttacttgcagtggtatcaatctgttcaagttgtttctttaacaacttgttttgcaaacgagtttgttgggctttagcacgatttaaactggttcttgccgcttgatctcttaacttagtctgtcgttcaaggtaataaacacttgcttcggtatctttttcgttagtgatcttcatggcaatattcaattttgcccgtgcttcaagttcctttttccacctagcaaacttagcgacataacttggatgtctcttcatatatcgacgccacgtatttgtagagatttcaatttgttcacaagcttctttaagactacagccagcaataataaacgtttgaaactgatttaatttttgttctgttattacttcgggtctaccacccttatcttttgtagcttttgccaaactgaaatcaccacctttttaggcaaaataaaagaactgatttactaaccagttcaataaacaactttcttaatttgtcaattcttttttctttcttatttttttaagctgttgcttcttataagcttcaaagttccctgcttggttttgcattaactttaattgcttaatctgcgaagctaaatcatttaatcttctagcagcgttttctaaatcgtcagaactaagatagcttttattagctgatcttttaagatcatcaccaactaaatcaatttgcttctttaaactttgttcggatagttctaagccttttgtacctaatccacaaaccttttgcaataaatcgaattctttttcatcaaacatttttaataccccttaaaatgaaaatacatacttatcttgaactaacttgccgttaatattaagctttttaccgtgattgtaaccagccttttcgtaaacatccctgtctactaaaaacattttagtggagtattctttcccaccgatattattagaccttgtgcttacactaaccaagcctaatttttcagcaattttcttttcaacgtaagcgtgtgtggcctgctataattactccctcattgtccacaacgataggctgttgccagccaaattctttaattgaatttgctacagcgtcaaccgcgtcatcgttgtcacgtgggttattttcatagggcttaatttcatcaattgatttagcttctacttgcatgatttagcctcctaaacttttaagcactaacataatcgtcattaaacatatgaacacaacaataactgctaacaaaaacgatgagaaacgttcttcacacgagcgttgcactctatctaataatgatggaacaggaacagatttaatactaataaccttaccgttcttatctttagttaccacgtaagttactttctttctattcatttttgcattcccttaaacttcctttaccgttgttggaacaaactgcaaatattcatcagctacaaactcatcatctttagtaatataagttacttcaaaatagcgattagaaagttttgcttcatctttgcccttaaagccgtggatacaaaacatagccttataattacgagctatatagctgtaccaagtcatccggatttttgccattaattcactttttgaaagatcagcatttaatccaacttctaaaaggtaatctgcaattttccctttagcaattctaataaaaagtgaatctgtcataggtgcttcttcgttatttttcatttcctaacttttcttaccaaatctatctaagtaatcttgcggcataaagcccgtttcttgcttaaatagaatcttctgcttgatgttagcaactgtattaattttgcagtacttaacaatttttcttgccttaactaaacggctatgtctttgacataactcaaagtaccgtgtaggtgtcattagtacaggccatccagattacttgggtcaaacgcaccaggaactttcttatctagttcttccttggcttgttcgcctacatctttaaagtgctttgccagcttgtcttcaagtttcttatcaaacttagcatcctttgcggcttctacttgctttgctacttgtaaaatggtgtccttgtaaactacaccgataaccacaccagcggcaaaagttaaaattttgttcataatttccccccctaaaaacaaaaagcaatagcttagcagctactgcaattaacgtgatcctgaatttttgggattctagtagcccatcatcgctgactacaacgagtaatgttggattcgaaccaacacgggtgcacttcgtaaccaattcaattgaatgtgttgtgaaataagttgcttattttacgcaccagattactcaacgggcaccacaggtattgaacctatgctactcacctaaattctgggaggaatctaaattaataacaagtatcaacttaacggtgagcagactacctatctgcccataaaaggcaagcctcttcaaacttgccttcgagcttatcaggactagaacaatgtttaataagctcagaccgctcggtggatttacacgtcttcgcagactacacaagccgaaggattcgaaccttcataaccagttttggagactggcgtgttgccgttacactaggcttgtaggagatagggttgcaccttttgcacaacccatatttatagtaaaaacaagagtttattaatgactcgtaataattgactaacaagttaaattaacgagcaacatcgaaagatcagatctctttcctaatctttcgactctactaatataacccgctttaatggtcaagtgttggtcaaaaatgcgtcaaaaattggcgtttatcggtcaaaaattggcgtttattggtcaaaagttggtcatttatcggtcaaaaattggcgtttattggtcaaaaataggtcatccatgcaccatcaacacgggaattagcctttcagcattgtacttcttgcggtaccgctctaggtgttgagcgaatatataaagtgcttcgtcccttttacgtccgtacgttcttggagaataattcatatcgttataaatccattgtgcaaaatcgtttttaacgtatcttctaaccaaaattttgcggtacggatcccgttcggtatcaggacaactgctcatagcttcaaccacagcacgggtagcattttcacagtccttaacaattgcatcgtacttgtcttgttgctcgatagcttttaaaaattgatcgggctgatggtttacattaccgccgccgtgaacacccgtagggtcgagaagtggactagataagtaagttaccggcagacctgaataattcataatgtctggaaaatcattttcaagaaaattctttgccttgctaattgttttttctttatcaaaattcagacctactaaactcacaatcttcactcccatgaaaccagccacgctggtgaaacttctaatacttttgctaacttttctactcgactaagagacggctcccgttgttgcttgacgtaccattctaaagatctctcactaattccactcaatcgtgataaatcctttagagtgatgtttttagccttgcatgcatcttagatttttaaatatgccatttgcttatcaatctgcgaaaacctctactgtccaaacaagtgaaaccggaacaattataaatgaaattgctaaaaggacggcaataatatcgtgtacatgaggcatccacagcacaaaaagcacagtgacggttcctaaacaaacaaagcaaaatgattgagcaagcctcaaaccccaagtttttctcttatctgccagaacttgataaagggtgaataacgtcaacccacatatgtaaacagcaaccactatcataattaattgaaaatacataattttcacctttaaagtccaaacagccaacgcaaatatataaaaagtaatttaaacccagctgctccaacgacaataaacacaaaagctattaacgcgctgccgagcaacagcgacaaaaactcaaaaaagccttttatttcttcttttatcttcatcgctaagcccctttgtaatctggatagccgtagccgactaagccttcattgactatctttacagcgtcctcaaccgatctagctataccatgaattacatgcttgtgcattaaatcgagatgatacagctgttgagcttggctgattctaccttttggtgccttaacttcaatgaagaaaaccttttgatctttaagacgatagccgattaaatctggcgtaccgggcttaacgcccctgaacagaccgccattcttggttggaatagcaccagcgtttagtctaatgacagcacaacgccgccagtttaatgtggagatgattgcattttgaattctgtgttcgggacctggtccccgtcttactcttctaactcgttgcattcttactcctgtgatttcaaaacaatttttaaaacttcttcgcttacatggtgggttgcatgattgccatagctaacaaaatgcaaatttaagtcatgtcccatcacataagttttaaagccatctgtgattgtttctcctactccgatatctagcatcaattcaccaccaatcaaatttttaagctagtttgtgcgttggaattttgaatttcacgttgaaggacaaaatcagggtaccaattacgtgtaaattccatagccttttcaaaatattgtttttccaagctgtcataacgtggaatttgaaactcttttttgaagtctttaccaaacgcattaaatacttttctagccttggtttctttgtaataattgctgtctgcaccaccaacagcttcaattactctcttttttcttgcttgtagcagctgatagcgttgaacttcacttaattcacttgttttctcaatatgctcaacacgagcttcaaccttgccaacacgtttaactaatcgattagtaacaaccattgtgagttgcaattgttcctctggtgtttgtggtaagttattttcatttctgattaattcgtccatgcggttaaaagcttcaatgtactcaagtttgaacttcattgcatccctaccagtgaaacccattgcaagcaaggtgaacccgtcacggttcatgtagtacattggctgttcttgcccccgatcattaacataagtgctttcagcaaacatctttttcactgctgaattttcagcagtgagatttctaatactttgaagcacatttttatgctctttactaaaagtagcagctactttcaagctagttgtcaaagccttctgacttttcatgattactaagtcattcaccttgtgacgctcctttcataaactcagccatttttttaccgtcttcaaacgcttgttcagctctcccctcagcgtaaccggcgttgtaattattagtacctacctctttaaccaatcgagctaaaatcttagcctgattgtgattagttactaacttttcttgatcgattaagtcatagccctcagaagtaataagaccgctaatattttggacagctaagatattttttaagtaagttactgattcactagtcatttttttattgctcctttagttgcctcaaattccatgaaaagcctgaaatagcctccatagccttgaccatttgctttacacttccgtaagcaccataaaaattaacgttgccgttagacggtagccaaacctcaactgtgcaaacgttactaagcttccctaagtaggctttactaatctggtcaatttcataagcagttaaattagggttgctgtttgcgtacttttgacttgttagataaaatttcatgttaatctcctagtaaaccatgctcagcaaatgaaaagtaatttccattaccaacgataaaatggtctaacatgcgtactttaattagctcagacaaatttttaattgaatcagtcatctttaaatcagcttttgagggcttcattgaaccgcttggatgattatgtaccacaatgaagttagcggccccattaaggcataaggttttaacgattaggggcactgaaatagctgaattctctaccgttcctgaacccactaaatcatcagaaatgatttgtccttggttgcttaaactgatcaaatgcatttcttcgtgatcaggttccgcatatttgccggctaggtaatcgccaaaaccacgtgaatcatgaaagatcggttcccttgtagttgctaaccgcaattcaagctctagcaatctgatataagcctttagccctctttcagataagttgttgctaaacaaaccgaccgacatttctttttttacgccctcaagcgttttaagcttatcgtagtggcttaagtcatcgcttaccgttttaatcaaatcttccatgttcatttcctgaacgttcttttctttgtaatctctttttgtcattgttcttagtccctttttttatcttgcaaataaatctaagcttgtctggtaactgctaagcatgtattttttggccttgttgtaaatatcacgttcaacttcaaagccataggcgtcacgccctaactcaacagcagctcttaatgtgcttccactccccgctgttggatcaattaccacatctcccggatctgtaaaaatttcaattaatctttgcaataccggcacgggcttctgtgtaggatgcaatttaggataagagttgtccgttacccacgggaagtgatcaagtatcatatgcccgttgtttctaaatttaggcagtttgtcacgataaaagacaagcgcgtattcagtagctccaacaattcgcatgttagcttttaatacttgcgcactagtaggcttattaaaagtaattgggaaagcgtgctttaacccttcctttttgccctcagctattagcatcggtatttgttgccatgcacaaaacacaatcattgccggcgctaaacccggcttttttggctctttaatcatcatttttctagcaaaatccatgaaattgatgacgttgaaatagccatctcggttaaagaaactggcttttgccttatcgctttcaccgtttttgttatcaccgcctttgtaccaaacggggttactgccataagcattagcaccaatgttatagggaatatcagcaataattaattgcgcttttggcaatccataccgcttaaaattttcaaagttatcgttgaataattcacacttcggctctctatttaatttgctcatactacttcactttccacgtccctaatcctaagtaaacgattttccgatcacccgtaacttggatttttccgttattccacgtatcaatcgcataaaggcgactattgggaatgtagtcaacaccaagcttccatctcataaaagcgtattggaagacatcagataattggcgtggagttactacgcaaccaatttttaaatcaaaaatcattttttacagcctatcctttaactcttctttgctaatgccgcaaaaagtgctatttagcattcctacttttttgcccagttccctcagcgttaagctatgctttttccttaattcttttagcctgttcatcacttaccccaactttcagaatccttgtcaattgctaacccatcacgaagcatttttagcaggtaggcgaatggatcattaaccatgttccattgcattttcatgtcaaacttgctgacaacggcgtttagagtgtcaatgttaattcggtaaagtaagcttcttaattgcttaatttcatcaaaagatggggtagtagttttccctttgatcttgtcgtgcatccttgccagttgaaaaaattgtttataaatttgttcacgttctgggtcttcttctcttcgtccagaagaagaattagatgttctattatcatgatctattaaattgttatatttatgtaaagcgggctttactaccccactaaattcagctttactaccctcatcaagtgggcttgtccaccctagtaaactcagctttactaggttaggaccagcttttatttttctgcctagtattatttttgatttctcacttttaggatttttagcgggaaccgttatttgttcccttatgattagccctttttgttcaagtaggttaagccaatcattaactgattgaactgaggcatcaagaatattagctagtgttttgttactcatgtgaaagtcgccagttacgttaagcattgaaataatttctcccatcaaaattattgatttaggcttttttaagagttctttatcccttgatattgatggtggaatcattaaaaatgcttttgcacctttaaactcgtccattttaatcacctaaaatgtcatcaaataaattttgttgccctttactcattggagcatcttcttttttatcagaaaacgggtctaccttaggcttatctacaatatttttaattacctcgtcttccggtttgggcttctttatctttttgaccgcttctttaacttgctggtctttttcttttcggcggtcaattgctttttgctttgtcttgtcaatatgatgctttagctcgtaatcaccaagcaactgtctgatatagtcacttgtagccttgtcatgcttacccttaatccagtttttagccttaattgagtgattattaacgtaatcctcaaaaattattttgatagcattttcatcaactacttgtgattgattcattttctgggcttgcgcatcgtcgtcatcttcgcttgcaatcccaaatgcggctgaaagtgaatacctttttccataactgatcaggcttgctgttgcttgtgcgttaccaacgttaacatttttgaaccaaactttattggttcgtacgctgtaacctgttgtcgcatcaacgattacggtttcaatagttacgccttcggcaccgttgtcaatatcgaagtagtaagtcaacaatggcttatcatcttgcttagtagctttaatagcgttcataattgacttatcaacatcagctaaatcagcatatttgtaagtgtagtgataaggcttgccgttttgagtggttcctcgaacttcaacttcgtgtgtctttcttggctgcacaatagccatcttgaccatggctaagtgcatagcccatgaagctttatcttttcgattctgctgctcattcgtataagtaagaattttcagttttggttcattgcccgttttcttatactttttgatgtcaaaattcttaattaattcttgatttggctcaaaaaaatcactaaacccttgttcttttgtagtcattatttaattctcctcgctttaattccccagtcttttaagaagctgttcaattgatcgacttggtacttagtaacgttttgaaattcgagactgaaagtataagtcttgtccttaacttctcctgtttgagggtcaatcgccttatcgccatgcttaaccaagtcggcttgttctttttgcttagtttctttttgctttttagcaattgcaatcaattcttctttctccgcctgcatgtcattaagaatctcatcaagttggacctctctttgcaattgatcgaagtagtgtgcgaacggaattcctagttcatcggctttttgaatgatgattcgtttattagtttcgagttgctgcttatttttgcgtaaaatatcaacttgctcgtataattcagcttcaaatttagggttgctataagttttgttatcccagctggcgttatatctaatcttgctagggtctacgccagcgtctttacaagcctgtttaataaatttgacatgttgatcatgcttatcttgtctcagcttgtcatcgtactgtttaagctgtaaatcaatgttttttgtagtttcgtcaataattgcaattaaatcatcgatgttagccttgaacatttttgctggcttttgaataccactagtaattgagattctttgtgaattgatagttcttttaagcttgtcgagattctttcttacttcttttgaagatttaaggttttgcggcgttactgtccaatcagcgaattcatcatgaacttttaagatgttgcctttcatctcttcatactttggaaaaataatttcagctggcttatagcttactgggtactcaataccgtcaaattggattagttcgttgttagtcatcgtaaatatctcctagttcttcgccgtcaaagtagtcaatgatcaagcctcttagcgtatcttcatttaggtcgtaccaatcggctaagaaatcacccattgaaaagcttggtttattcggctcataccctagaacccttgcaagctcgttcaagtcgcctttatagtcttggtttacctttttcatgaagaaatccattggcttttcataagcgttgtaaaagtcatcagcatttttagtaattaatgcctgttcttcaccgtcccagaaaagaattgcgtctggctcttctagcgatagatcttttagtgcttgattttcgtacaagtactttgcttcttttacttgttctgcatttaacgtttccatgtggtataatctccttattgaaatattctttctttgtttaataccctttactgtctctagcagtagagggctttttgctttgccaatccaagaaactttttaacttctttggtcaatctagcgaaatccccactagcaacgctaatagcattactattagcaagaacactgcgttggaagtctgtaagttgattcttttgtccacttgaaaaagttcgtttataagttgattccataacttcattagtcctccaactgctctttaatcatttttttaagagctttaaaatccgtcgatagcccgttttcatctgcttctttctttacccgctcgtaaaattgaatcgctagaatcatttgttgaggtagcgacgccatagttgctgtttcggtttgtacgccaacaaccgcatttattgccggctgtggtacccgaagggtatcctgagggatttgaagaattgcaaacgaattttcgttttgaataatttccttaactgctttttgcaaaatgtcataaccgtcttgtctcactttttagtctccttaattcgttgctgataaccagtcagtcttaacttttaaaactttctcaagttcatgaagtactcgcttgttaggaaaactagagccttgctcataccgcccaatagttctaactccaagccctacggcttccgctaattgctcttgtgttaagttcttgttctttcttgttcgctttataacgaactttgaaaattgctgaattattcatatgctcacctactttctaagcttctttacggcacgtacgcctaaagccgtaaagagaattaatagaactaacagcagggaaatgatttggtcggggtgcgatgtgcggtaaatgcaaacctgttcaacgattgcaaatggtaaaaatagaattgctaagaattctaggaacttcccaaacgctttagtcatatgacttaaaacgtgatctaacttagttctgccgtactctctttcgtattcttctttgctcattttgctttctccttttgaacttgcttgccgttttcaatacagtaatcaatcactaatcttctggcttcatttactagttctgttgtcttttccgacttcttacggttttcaaagaacctaaccatcacttcacttagcaagtcttgcaagcctttatagccaggttcaaatgctactagtgaaccgttatctagccagaggtaaaatctataatcttcatcgctggtaatgttgaattgatccgggttttcgtcaaacacgccaaattctttgacgatttcgtaaaccttcttatttgtaattactgtcatttaaatcaccttttctaaataccttcgcttggattcttctgcaaaatgatctaagtcttcccgcaaatagtacttattgccgtcatcgccaaatggaaaagttgggtcaagttttcccgtcttaacagctttatcaagtgtgccgccgctaaagcctaaatacttagcagcatctttgcggttgaacattttttgatcaattacttcgccacgttttttcagttcctctctaactacttcttgaacaatcttttcgatgatttgtttcaacatagtttgattaagaagttccatttttagtcacctcttttattagttaccaatttcttgtaacttttgtctaaaaaaatttctggtaaaattcctaaagcactacttacggcaaaagcaaaatcaacagtaaacttgccatggccgtttaagtagtagcttaaagtagatggcggaattcccatcttttcagccaggtatttatttttgatgccgtgactgtccagatacttttttagaatttctgaagaattcgattttgtaaaccgtgtcatctgttcaccccccttttttttatcatttaaaagttacaagtaatttgtaactccttacacgttttataatactacaaatatttaaaattgcaacattttactacaagtttttagtagaaaagtactatttttttgtatttaacttataattgcttatataagtacaagaaaataggaggtttaataatgactgattttagtagtaagctcaaatacgagcgtgagcggatgggatggagcaaaacaaaactagcgaagtacgttggtgttgggctatctacctatgctaattgggagtacggcatagcagaaccagatattgcaactattaaaaagatttgtgaagcgcttggaatttcttctgacgttttactagatttaagtgttcaaaatgccgcatcatctactagtgatttagatgaaatgttagatgatgcccgttcgtttgatggtaagctgttggatgaacatgacagagaattagttagaggaattttaaaaaggatttacagcgaaaaataaggtgtttgtcttggataccaatgttagtaagttacttaaaaaatataaattaaaactggaatttgcccctttacattgtcctggcttaatagtgcatggcaaaaacggaaaacctgatgtaatagtagttaactctaagctcaacgacgatcaagtggaaaacgtcattctacatgaaattggtcatgcaaaaaatgatggtgacgttttaggcgactaccaaacaaatgatagtgcccgctcatgtagcgagcatggagctaatgttttttggattcacgaaaaaatcaaacagtactttgcgttaggtaatgatcttgacaacgcaaattggttgagtattgcaaatgcgcttggaacaactgattactttcaggtgcaagaagaaatacataaatatgctttattggaggaataattatggcaggttacattatgtttttggtaattggattaggattaatcccttttgccttttggattgacaaagttaacgcaaattcaacaattggcaaggaacaccccgaaaaattaaaaaagcctttgcataagcgatggtggatgtacctaatcgcggttgtcttagtagttggcagtgtcgcaaatctagctgacccagctacttatagatccagcaagcccaagtctcaccgcttagctagtgataaagaaatgcaaaaggaatataaaaagacggttgaagaccgtgaaaatgctgaaagccaaaatttaccaggtcaaaaattaaataagaatttggctaataaaggcgaatctttttggacagctaaaaacgataaaaaagttcatatctttgcttatgacggcaaagtaacggctatcaaatacgttttaaagccgaatatacaaagtactgtcacttgtcaaagcatcttagaaaagctattcaacgataagaatttgaaatacggcaacgacaaggaaaatagcaatgatgcgttactagataacggttcatcttataacctttactcgcctgctcgtaaaaaatggtattggataagctttagtgcggctgatggtaaagatatggtttctactttttccgtctattctggcaaaaatagtgacgcaaaataaaaaacacccgcctactctatcgagcgggcgggttaatttatacggattgaaagaacattagtttagaaaggactagaacatgccaagaaaaaaagatcctgaaatttacgattacaagttgaagtccggtaagacaaaatatggctttaaaacctacgtgggcattaacccagaagatggtaaacctatcaagcctactaggcaggggtttaacagttacaaggaagcagaagccgctaagataaaattaaaagccgctggtgctatcagcgttgcaaataatcgtaaagccgaatccaataagaaaacagttcaagaagtctacgacatctggttttcgattaaaaaggataatgttagggaatcaacattatacaatattaaatgtgattgggaaaatcacattaaacctgagtttggtaacaaatatatagatcgtattgatatcacgcgcttacaaaagtttgttaattggttatctcaaaaatacattagttatcagtataaagtcaatatactacacagaattattaagtatgcaattttgcgcggttggtgtaacgaagacccttttaataaaattgttattcctaaaaaatcatctaaaaaaagtgatcgtcctaaggaaaattattacaatttagatgaattgaaggaattcttaagtgccgctaaagaacataattactcctactatgcgttttttgtagttctagggaatttagggctaagacgtggtgaagcattagctttgaagtggaaaaatattgatttcgataaacaaatagtacatatagatcacactgtatcccacgatttgcaaaataaaaaagtaattggtgatcctaaaacgtattcggcaaaaagagatttagccttatcaaagaacttaaattatgttttaagggaatatagaaaaactcagaaagtttttaatcgtgatgatgattatatttttcacacgaaaaacggaagctttttcaattcgccggcagtttcagaatggatgaaaagcatttaccgtttttacccggaactaagaaaaataaccgctcacggctttcgccatagcttagctacgctactttacgaaggaagtgacaagataacccctaaagatgtacaatacgttttaggacactctagagtaacaacagcacttaacatttatacccatgtcactcagaaccaaaaaagcaatatcaaaaatgcagttaacaacttggatttagaataaaaaaataatttttccgtactttttccgtaaaattttattttttaatgattcaaaatcaaatttattgcttatactcccttatataaagctaaaagtaactaattaaattcttatttttgtaaaattcatgcaatatatgaacaaaatttgacgacaaaataagcatccctacgccataaaagatcgttttagggatgcttatttaattaataatctaattcttgatccatacttgcaggccagccaccaataccacgtttttgatcaaggccacgcaatgtctccatctcttcagcagtaaattcaaaatcaaaaatatccaaattatccttcatgtgtaacggattcgtcgagccaggaataatcatgatattttcttgtaccaagaagtgtaacgcaatttgtggcactgtcttattatacttctcagccaaagaaagtaaggttgggtcattaaataaagccttcattccttcaccgagtggtgaccaagattcatgtacaatattattttcaattaaatatttatgcattttcttttgttgcttaaagacagacgtttcaatttgatcaactactggcttagtatcgaaattattcataatttcatttacttgatcatggttgaagttactcagtccaattgaacgtagctttcccgcctgatatgcctcctcaagtgcctggtaagtacctaaactatcagacataggccagtgaataatcattaaatcaaaatagtcttgctgggcgtgaattaacgattcatcaatcccattcttcgtctctctataaccacttgtttgcgctttagtggtcaaaaaaatgtcttcacgtttaatgccgcttttgttaatagcattgcctacttctgcttcattactgtatgcttgagcagtatcaattaaccgatatccagccttcaaagcctcgacaaccgctccttcagtaattctaggctgaattctatatgttccaaagccgaagattggagtttttacaccgttattaaaagttaaatatttcatttttattcctcaatattttattcaggatcagatgcagagtgataagtaatactaaatccagcttgatattccttacctggctccaaatgattcataccatatttgtgctctagctcaccatcagcatcttctctatctgcaattccccaccatggctcaatgcatacataattagcggtatttggatattgtgaccaaatgccaacatatggtgcatttctagtccaaacattgatgtggaacttactcttatcagttctcaaagatactttattgtcatgaccatgtaattcataaatcaaggcatcatctttaaatagctcatcacttaaaccaataaaactatcagtcgaagctagagaacgattattccagtcaagatatgctcctttaagtgggatttttaccctagcaatagatggatgcatatcgaaataataatcttctttctcttccccattatttactggtaagttaaatccagggtgaccacctacaccaaaaatcatagtttcatctgatttattaactacgctaaagttttcttccaataaattattcatcaaattatagttaactctgaattcaaatttaaatggatacatttcacgcgttttttcattatctttcagtaagaacgtgatactttcttgtgtatgattctccacttcaaaatcacaatcacgggcaaaaccatgctgacccatatgataggtcttaccttgatacttatattcatcattcttaagtcgccctacaattggaaaaagtacaggtgcatgtctgccccagatctctggatcagcttgccacatatattcttcaccggtatgagctcctttaacgctctgaacttcagctccgtgatccgaaatcactacttcgatcatattattcttgattgtgtaatccataactaaatttccctctacatatcaaacagttaaaaatcataatgtaatcgcttaattacttatattttaacattaatgcgtcaataagccagaataaaaacaaaagaaaaaagcattcaaactttgaattgaatgcttcattcgtgattctttgatcaattagagaataaatttagttaagtctttattcataataatatcgcctaacttatcttcaacataggcttcagtaactgtgatttcacccatttccatatcaggcccttcgtaaagaacgtcttctaagagcttttcaagaatagttgaaagtcgacgagcaccaatattatcagtgccttggttaacatcaaaggcaatctccgcaattttatcaacggcttcttgggtgaaaactaacttaatgccatctgccttcattaaagcaatgtattgcttaagcaatgaattttgtggatccttcaagatcttgacaaaatcgtccttggttaaagcgttaagttcaacccgaattggaaaacgtccttgaagttctggaatcaaatcactaggcttactttcagcaaaggcacctgcagcaataaacaaaatatgatcagttgaaactgggccatattttgtatttacagttgagccttcaacgattggtaaaatatctctttgaacaccttcacgagaaacttcaccagaattacgtttattaccagcaataattttatcaatttcatcaataaagataattccgttattctggcttctttcaatagcatgttgatagatagcgtcatagtcaactaacttacgtgattcttcttgaatcaaaacttcacgtgcttcttttactgataaagtacgcttaacctttttcttaggcataagatcactaagcattgagcccatatccatccccatttgacccatcatgtcactcattgggttggccttaggagcttgttctacctctatggtaacttcgtgatcttcaagtaagcctttagctagcttttcagccacatccattcgtttgtttcttacatcagcagaaacatcctcttcatgatcttcttcgcgattattttctcccatcaacatagacatcatatcttgcatttgctgcatttgattttcacgacgttcatgtttctctgctggagctaacaaacgaactaattctttatttgcttctttagttgcttgagtctttacacgagcaaattggtccttttcttccattcgtacggcttcggaaaccaagtcacggaccattgattcaacgtcacgtcctacataacctacttcagtaaacttcgttgcctctactttaacaaagggagcttctacaatatcagctaaacgacgagcaatttcagttttacctacaccagtaggaccagccattaataaattcttaggcgttacttcacgttgcatttctttagataactgcattctacggtaacggttgtaaagagctatcgcaactgattttttagcttcatcttggccaataatatattcgtttaaaattttaactatttcttttggggtcttaatagccatttccttcactcctaaatttcatcagtgacaattttatcatcagtgaaaacatcaattcctgaagcaatctttacagcttcatgtgcaatttcatcggccttcatatcttttgcgtgtcgagtcatggcaatcgctgcggcttgagcaaaattaccacctgaaccaattgcaactacgttttcatcaggttcaagtacttcaccattacctgaaattaaaagtaggtctttgtcatcaaaagcaatcaacattgcatttaatttttgtagagttggatccttacgccatgcttgagccatttccacggcagcacgacgaagatcgcctgagtagctttcgagcttgccctcaagcatatcttgaaggctgactgcatcagctacaccaccggcaaaaccaattactacacgatcatggtaaatacgacgaatcttacgcgctgttgccttggcaataactttttcgcctaaggttacttgtccatcaccggcaattgctgtttttccattaaatcttactgaacaaattgttgtcatgttaaacctcaactttctttattacgaggaaaatatttttgataatctgattttaaatgagccattgttacatgagtatagatttgcgttgctgatagactactgtgtcctaataactcttggacacttcgcaaatctgctccattattaagcatcgcggtagcaaagctatgtcgcaactcatgtgggtgtactttaccactaattcctgcctgattaaaagttttttgcattacagtttcaattccgcggctagtaatgccagttccttgattatttaaaaatacatgctgttcatcatcatttttaagtaataatggacgtgcattttctaaataagcaatcaaagatttttttgttttatcatcaaaagcaacatagcggtctttatttcctttaccgtgaaccaaaattgtctgtaagtctaaatcaagttgattcaaagtaagattactaacctcacttacccgcatccctgtcgcataaaacagttcaaacattgccaaatttctcatcgtcaaaggcttatttcctttcaatgaatcaaaaacctgctttaattcaggctggtaaaaaaattgcggtaattttttctcaccacggcgtaaagtaataccctgagttggatcgattgccactagtttgcggcgggttaaaaagtggtaaaaagaatgcaggctggacatcttgcgcaactgactactacgggctaacttgcgttctgctaaatgttgtagataaacctggatatcacgttctcttactttagtccaacctgggaatccaccattttcatgccaaaacctttccgcttcatgcaaatctgtttgataagctaaaacggttttcgcactataatgacgctcattttgtaaatatgataaaaattgatctaactcactttgcctttggttcattaatctaaaacttccgtcttaaattcatctaaactagcaagaccacgttcactgaccttctcatggcgctcacgcttcttgcgaatcttcttaccctctagtggaggtagcaaagcaaaactagcattcattggttggaaatgtttagcactcgtagtagttatgtagttagccattgagcctaacgcagtatcttttgggaaagccacagtatctttccccatagcttcacgtgctgcattaattcctgctactaagccactacctgcactttctacatagccttcaacacctgtcatctggcctgcaaaaaataatccaggctgctcttttgcctcgtaagaagctgtcaaaacttctggtgaagccatataagtattacgatgcattttaccataacgaacgaaacgtgcattttctaagcctgggatcattgaaaatactcgtttttgttcaccaaatttcaaatgagtttggaaaccaacaatattatacattgaagctgcagcattatcttggcgcaactgtacaactgcataaggagttttgcctgtatgtggatcttctaatcctactggtttaagtggaccaaaaagcattgttttagccccacgcgctgccattacttcaattggcatacacccctcaaaaacatcgctattttcaaaaccatgtaattgcgcagtttcagcgttaattaattcctgactaaacttttcatattgctctttagtcataggacaattcaaatatgcagcttcaccacgatcataacgcgactttttataaacaattttcatatcaatcgagtcagcggccacaatcggagctgctgcatcaaagaaatgtaaactatcagttccagaaaatttttgaatctgtccagctaaagcatcactagttaacggaccagttgcaataattgtaatcccatctttcggaatttcagtaacttcttcttcgtgaacagttacattctctaacccacgcaaagtgtcagttacgtatttactgaaactatcacgatcaacggctaatgctccacctgcaggcacttgagttttgtcggcagctttcatgatcaatgaatctaaatgacgcatttcttcttttaaaagacctacagcattagataattgatttgatctcattgaattggtacaaaccagttccgcaaattcaccagtttcatgagctggagtctccttttttggtcgcatttcataaaggtcaacatgaataccacgcttagctaattgccaagttgcttcactaccagcaagacctgcaccaataactgttacattttttggcatttactcacctatattttctatgttaattgtttttttcgttttcactgtcttcacgataatcaccgttaggacaaagaatcactggaccttttttagaatgcttttctactaaaaagtggccatcatttggacaatttctgccaattggcttgtcccatgagacaaagtcgcattctggataacgagaacagccgtagaatttacgatttctacgtgatttcttttcgacaacctgacctttgccacattttggacaaactacaccgatttctttaatgattggcttagtattacgacaatctgggaaacgagaacaagcatagaacttgccatagcgtcccatcttaatcaccattggtgcaccacaaatatcacaattaaagccagctggttcatccttgatttgtaccttttcgatttcactatcagccttatttaattctttcttaaacggttgatagtattcgtcaacaacatgaacccaatcctttttaccatcttcgacttcatccaattcattttcaagtcgggcggtgtaatcaacatcagtaatatctgggaagaagctttcaattaagccatcaacaatttcacctaattcagttggtacaattgaacgaccatcaagtttaacataatagcggcgttgaattgtatctattgtaggtgcataagttgaaggacggcccacgccattttcttccaatgcgtgaactaatgatgcttcagtatagcgtgctggtggtaacgtaaagtgctgtttgttatcggacttagtcatcttgaccttgtcaccctcttcaagatcaggtaagtcaacattcttttcttgttgattatcataaaccttggtgaaaccagcaaatttcaatttagaaccagtagttctaaaaatcacaccattttgaacaatatctgcacgaacagtatcataaacagctggggtcatttcactggccaaaaaacgtgaccaaatcaatttgtataaacgatattgttccgtagttaggacactctttaatgactccggtgtgcgatatacagatgttgggcgaatggcctcgtgagcatcttgtgcgtcttcttgattcttaaaatggcgttgactcttagctgcaaattctgcaccataattttcatgcaaaaacttagaagcctcttgttgggcaactggtgatgttctcttagagtcagttctcatataagtaatcaaaccaactgttccttgcttacctaaagaaatcccttcatataattgctgagcaatactcatagttctacgagtacgataacctaaacgcttattggcttcttgctgcattgtagaagttgtaaatggggctgctggctgacgccgacgttgccgagcaacaactttatctactacaaagtcctttttcttatcgattttagccaaaacatccttaacagaatcgatattaggcaattctttctttttgccatcaacaccataaaaggcagatttaaaagtttctttacccttagcaaattccgcatcaattgaccaatattcttttggcttaaagttcttgatctccttttcacgatcaatcactaattttaaggcaactgattgtacacgtcctgcagataaaccttttttaactttggcccaaagaattggtgaaagtgaataccctacaattcgatcaagtacacgtcttgcctgttgggcatcaaccgtatccatatcaattgtccggggatgcttgaagctttctttaactgcatccttggtaacttcgttaaaagttactctattcttggctttttcgtcaagattcaatgcgtgcgctacgtgccaagcaattgcttcgccttcacgatcggggtcggatgctaaataaacatccttagccttcttggcttcgctttttaattctttaatggtatcgcctttaccacgaatggaaatatacttaggcttatagtcgtcttcaaagtcgattcccatttgtgacttaggcaaatcacgaatatgccccttggaagcaataacgtgatagtttcttcctaaatatttttcaatagtcttagcttttgcaggtgattccacaatgactaaggtctttttacgtttttttgttgttttacttttcgctttagtaggcattaactgcctccttaattcttattttattttatgggtacagtccaaaaataactaatactttctgaattgtcaaatctttatcttgttaaatttaaaatcaacaattggcgtagctcctgcttcaattaattgattgggacctgcagacaatgcattagtaattggtccaggtactgcataaatatcgcgattttcttgtaacgctaaattagcagtaatcagtgaacccgacttttctttagcctcagtaacgattatactttgacttaagccggccaagatacggttgcgttcaggaaaacgatacggacgcggtggtgtatcaggcaaatattcactaatcaatagtcccttttgcacaatctcttcttgtaaagcaaaattttgcattggatatgaaaaatttaaaccattgccaataaccgcaattgtttttccttggttgaaaagtgcagccttatgagctaaggcatcaacgccttttgctaagccacttgctacaacctgaccagattgcacaatattaggtaccaagcgattaataacatcttgactatacttagtcggatagcgtgagccaacaattgtaatgatttctttttgcagtaaagaaatatctcctcgggtaaacaataccataggtggtcgataaatttgacgtagtttttctggatatgcttcatcgaaaaaactgattacgtcacactgctgttcaatttgttgtaccattcgatccaactgatcatcctgaaaagcgcgatagcatgcatccattagttcctcagttaattcaatttgttctaattcttcaaattcaatttctgtttcatcagttacctgattagcaattgtcagcaatttaacataaccaatccctttttgcaattttaattttagtagaaattctgtttttttcataaaaaaagccctccactatttattacgcaaaaagagaccattatttttttataaattgaaatttattcaaaaaaatcactgactggagcaaatgttttgcggtgaattggcgtagggccatactttttcaaggcttcaatgtgctccttggtgccgtatcctgcattatgatgaaagcaatattgagggtatattctatcataatcatccatcaattgatctcgaaagaccttggccacaattgaagctgccgcaattgaattcgacttagcatctcccttaatcaatttaacttggggtagatttactggcacattcattgcatctaccaaaagtgcattcggcttaacatcaagtgctcgtactgcttgagccatcgcttgacggtcagcttcataaatattaatttgatcgattacctctgcactttttactccaataccaacactaactgcttccgctaaaattttaggatataacttcaatcgtttctctgggctcaatttcttcgagtcgtttacatctaataaatcaaaatcttgatcaattatcacagcagcagttactaccggtccagctaaagggccacgtcctacctcatcaacacccgctactaattgtcccttttcccagaactttttttcataagaaaagcgacgcaaaaactcttctttttttgctagtaattttgcttgacgcttacgataactaactaacaatttttgtacgccggcccgcggatctgcctcaagttcgttaatttgggcttcagagacctcagatttcaacagctcttttatttctttaattgtcatggtctatctaacgtaatccttccgattgcacccttacgcaatttttgtaacataaataatgaaaaacgatcataatcatcacgcatgccatatttttcagtcattgacaaaagcaaatctggatcagccatatcagcaatttgctgttcaggtaatttagaaaatttaagcaaatccttagcataaaattcacgtaaatttttcaaaacaaataatgctacatcatctgcatgaaaaacactatccttaattgcaccgaaagcagctaatttataaccaacttcctgatcagaaaatttaggccataaaatccctggtgtatcgagcacttgaatattagcatttgttttcagccatctttgtcccttagttacacctggtttgttaccgacttcagccacgttccgaccaactaaacgattaatcaccgttgacttgccacagttaggaatacctgccaaagcaattctaatagtaggatttgaggcccctcgtgcttctagcttctctgttttggcagctgccgccttttttactaaggaaaccaacttctgcatattagtattgtgcaaggagtcaagtgccaaaacatacttattatctccagctaattctgctgcccatgcctttgttaaaactggatcagctaaatcagccttatttaagataataatatgtggtttattaccaactagtccttcaatcattggatttcttgaagcttgcggaattcgggcatcaagtacttccaccaaaacatcaatcagtcctaacttatcttccagttgattacgagccttgttcatatgccccggataccattgaattgttgccatattatctcttctttctaaaattaatcattttcatcatctaagaacaccacttctgacatcaaaatctgtctatataaagccagaaagcctcgacgatattttctctcttgttgtgcaattttacctaaatagtcacgttcttgtctaaaagcatatctatatacctcagctctaaattctttctgatcatcgggtaattctttttgtttaattgtatactttatttccctagcaaaatcaaccatagaagtttgattcatttgtgcccttaaatcgaattttaattgttttcgaatctttttaggtaaatagatctttttcatttgatccatagcatactcaatcattgccacacgaactcgatcaacttcctttctttgatcaaaatcaggtatatctttgtccaagatcatgtgaaaaacaattgttggaacaatcatacttagtaaaataagcgtaatttcactcaccaaaattaaatggaaatctgctacattaatacgtaaatcatataacgtatatgctaaagcaaaagtaactgctccatgaatgccacccagactaaaaatcaatgcttctttattactcgtttttcctttaatagaagggctaaatcgataataaaagtatctaataagcaaattagctaggtataaaattattccgatcaaaatcgcatcaattgtttgttgattaaaatgtcttccctcattgaccgaacaatgatgattcccaaaagcaaaaagacaatcccatttaaaatatcaatcagaagttgcgataattgattactgttataaaaaataaaggcattagtaagcctgcttcgctcagattcaacgttatgaatcaatccggctgcaacgactgcaataattccagaaacgtgaatttcttctgctaaaaaatatattattaacggtgtcaaaaagaatatgacatcaaccggcattgcaacaccagcagataaatgatatttggagcgaaaactttcctgacgcaagaaaactaataaagtagccaccaaagctcctagaaaaaacctccacctgcagaatataaaaaattacctattgcttgtccaatccgtaattcttgatgcaagtaccaatcaactgccatattaagcaaaatgatacctgaagcgtcattaaacaaagactcatcttttaggtaaaaagcaatcttcttaggcagcttcaatccatgtgttacagattctgttgctgtagcatctgttggcgttgaaattgcagccagaataaaagccagtggtagagagacccatactaaaatagatcccgaatcccgcagttatagttgccaagataatcataataaccgttaacccaactattgcgccccacgaacgtaaaacattatacaacctagtacgttgtccctcaaaaaatagtaatggcgctacaatcaagcccataaataattccgagctaaagtcctcaattaatgaattagtttgtggtactagtgcaatagccgctccaatcgccattgcaatgtaattaactgatattctcttcaaaaagcgttgttgaataatcgtcgcaaatgctaccgcaaagacaataaaaccaataaaaattactacctgcatttttctacccacttaataaaaaagcccaggcatctatcaggcttgggcttaatacatcattttgtcttcatacattcgataagcacgatcaaaaattgacatacttggtaaataactagcattcaattccaaataatctgacaatttctcataatcttgttcttgcttaggaaaagtcaggtcatgctgtgcattattcgcaaattgagctacgtcatcagctgaatctgcatccctttgcgtcattaaatatcgataaaaactttctcggtaagccataattactccacataatataagatcgcataagcaccattgccagcatgtgttgcgataattggacttgtctctgccactaaaacattaatcgcaggattgattgcacgaattttttcagctaattcttccattaattcaggtgtatcaacgtacgaaatgcctacttctttaatatgctctttattatctgcgatttcttttaacactcgttcatcaaaagcacgtgtaaatttcttacctcgtccttttttggctacgattaacttaccttgtggcatctgaagagcgattctaatattaagcatagtagcaattcgaccagaaagtgcacctaaacggccacccttgattaagttttgtaaattaactaccatcatttccagtttttgagtactacgaatctttttaacatgatcaataatctcagccatgcttttaccagcctgagcatccttagcagcagccaaaacttggaagccttctgccctgtcggttagttcagagtcaataattgtaacattatcgctttgacctgcaatttctgcagcttgacgagcggcatctatcgtaccacttaatgatttagctaagaaaataccaatcacttgactgccatctgcggttaattttttaatcacatcaacaaaacggccaattggtggctgactagtcttaggtaagctctccgcttcattcatcttcttgacaaaatcacttctagtgatatcaatcccatccacatatgacttaccgtcgatggtaatcgtcaatgggactactgtaatgtcatatttttcaacttcttctggtgttaattggacggaagagtccgtcataacttttatcttcgacaacgtattcgccttcaattctaatttgtttacccgatttatgataaaatgtaagcaacatatatactgtattgtatcaaaaaactattagaagaaaaaaggattgattacacttcatgaaaattagcaaactttggcagcaaccagaacaacgatcagaaaggtactaccttctagataatatttttagtgccataactcatgggattggtttcggactagcagttaccggcttagtaattttaattgtaaaggcagctcatacaggcagcccgatgcgagttgttactttcacaatttatggctcttgcctggtactgctttatttattttccacactatatcacagtttagtttttacacgggccaaaaatatttttcaaatttttgaccattcctcaatctttcttttgattgcaggatcttatactccatattcacttgttgcaattggtggagcctggggttggactttatttggcttgatctggggcctaaccatctttggcatcatttactacatcttcaatcgtggtaaacacgtcatacttgatacaatcctctatgttgcaatgggatggttagttatcttgtcaggatcttatttatatgttcgcttaagtccaactggattctggctattagttagtggtggcattgcttacacaatcggcgcgattctgttcagtatgcgcaatgttccctttatccatactatctggcatttatttgttatgctcggttcaatcttaatgtacttttccgttttactttatgtttaaaaaatgtagcagttgaattctgctacatttttctttctattcaattgtagtcaaatagctttcaatcgcttcttgattattctcaacttcacctgaaacaactaactctcgaattttattcaaagtctgccccaattttgcacctggtcgcatcccgcgatctattaaaaatctcccatcaacggctagttccgacgcttttttaataggtaaagccatataacgatcaactaaagcttctgaagaaattggttgaccaacaatatgagcaacgtcaatcgtattaattaatgtctcttcccctgctaagaataattcataatcactaggagcatgactagaaagtaaatcaaatagattaataattctttcgacttgctcagtcatagcattagagtttttccagtcacgcataaaacgatgaatttgttcattcggtaatttcaatagcaaaattatcagtgaccacaaactattttccatcgttggactgaattttaactgtgggaaaatagctagttgatctttttttccgccaaaatcaggtacatcttcactcaaatttgtatcaagaaaaacctgaaaagcttgccgagcatgtggtcctaaacctaattttacaaattcttctcgaattcgttcaactgaaatttttttaagtaatttatgattatccttaattgcctgttgggtcttgctttctaacttaaattcaagttgactcataaaacgtacggcccgcatcattcgcaaagcatcctcgtgaaatcttttttctggatcacctacagcacgaatgacatggtttttgagatcatctagtccgttaaataagtcaacaatttgccctcgtgtatccattgccagagcgttaatcgtaaagtctctacgctttaaatcttcatctaagttttgaacaaatgttacatgatctggacgacgaaaatcttgataacccgattctgttctaaaagtggtaatctcataactttcaccaccataaaggacagtcaccgttccatgtttaattcctgtatcaattgacttatcaaataactcttttacctcttctggataagcactagtagtaatgtctacatcatgaacatgacgatgtaacaaaacatcgcggacagaaccacccacaaagtacgcttcaaagcctgcattttctaatatctgtaacacgggcattgccttggtaaaaatttctggtaaattatctatctttatcatattaaaatctcaattcttattgtctttattattacttttgctatacactttgttaaaattgaggaaagacataaaggaggtaatcattatgcgtaagattgacaaaagtatcttaattgatatcctcatgatcgcgctaggctgtgctatttccgctttaagtctagacatgatttctgtccccaataaactagccgacggcggactaagtggtatttcacttcttctgcggcatttttggggcatcaacatgggactatcgacccttgtattgaatattccactaattttgttaggctatcgctttatgggcaaacgtcttttagcctatacaatctggggaacgctcagtctttcctttttcttatggttttggcattcagtacctattataaaacaattagatttagaacacgacctcttcctttcagcaatttctgctgggttattgtctggaatcggattagggttagtatttagatataatggtacttccggtggaactgatattattgcccgaatctgtcagataaaatttggtatttcgtctggcaaaatgcttttagcttgtgatgcaatagtactcttcgcatccctatcttacctagacatcaagcatatgctatacacattattagcttcttttgtcttatcccgagtaatggataccgttcagcaaggtgcatacacagcccgtggtttattaattatctctgacaaatatgaacaaattggcaagatgattgatttaaaactaaatcgtggtttcacatatctaaaagctttaggtggctatcaacaaaatgaaaaacgtgtaatttatgttgtagtcgcaccgcgggaaattccatcaatcaaagctttaatcaagcaagaagatccacatgcttttgtttcaataattgaggtaaatgaggcaatgggagaaggatttacttataaaaaaccacatcgctttttcatccacaagtaaaaagctataccatgatgcatttcatgatatagcttttcttttactaataattaataattacagtcaatacgttattagctttaacgtattcgttttctccaatttgaatgaatggccgttcatcaatttctttatggccaagatttttaactttagagccttgtttaacaaacttacctggaattggctgaccatttttatcataaacatatgatggatgcttaatgcggttaattgtctcggctgtgtccttaatgtatggtaaaaatgccccttccttaacgaatttattcttaccaatcttcacaaaattattgccattaattgatttaatgcctaggatcttgtaaacacggcccttttttaaatgtccaactttttctcctttacggttaaaaatcgttgcttttctagtcaagtttaactttttaccctgacgaattggattagttgtagctgcgttaactgtctgagcagtcatcgcacctaaacttaaggaggctaagactactcctgccatatacataatttttttgttcatcatgatctcatcccctaatcattacttaatcttcttacctatattttaacaaaaaatgcagaggttatacacttttctctatttttatttatgggatggataacacttattctttgcaatctttcatggcaagaactaatcttagcttgtaagcgtttgtcaatatcaagcaatcaagaggatgaaaacaatgccaaaaaacagttactcccaagaagctttcgttcatgtctatttacttcttgggaattaatggggtaattgggtccggtgcctttttaatacctcaaacaatctataaagatatgaacttgatgagtgttttcataacaatttgtgctgctcttacagtaagtatggttactctttgttatgctgacttgtcaagtcgttttactggatcaggcgcagcttggctttattcatatcacgcctttgggcgatttactggctacgaacttggaatatatacttggtttttaggatgctgtacatatgcggcagaaatagtagctttgttaactattttaaagactttgtcccctgtttttagtaatcacgctgttcactacgggatagctattggaataattgtgctaattgtgctgtttacgattattaacttatttggtcggacaattgtaaaattagtcgataacttatcctctgctgccaaaatgattactattctgatttttatcatcattggtgccttttttattcataaaatgaactttacacctgtgattcctaaagcagcaaccctaggtgttggtccttacttcaaacattttggtgctgcatttagtgtagtattttacatgtttactggattctcctttattccgattgccccaaaacagatgaataatccagagaaaaatattcccaaagtattgatctcagtgatgatcactgtgactattttatatgcattaatgatgttagtagctatcgggattttaggatccaagatggttaattacagtacgcctattgctgtagcctttcaaaaggccgttggtgattggggctacgttctagtgattgcagggatgctgattagtgttatcggcgttgcttttgcaggatctttcaatactccatcgttgattgcttctcttgctaatgagcacgcaatgttacctaaatggattggaaaaaagaacaagcatgatgctgcttgggtagctattttactcagtgcaatcatcactatgattttaatcacacaatcatacctcttcttggtatcttgcattgtattggcttcatttattcaatatgtaccatctatcttagcagtaatcaaattcaagcatactaatgaatttccaaataacggttttaagctcccattcggctatgttattccagctttggcattaattatttcatgctacatggtaaccaatttcacttggaaaactattttggtcggaatagtcgtaggggtattagccgcagtagcttacttcttcattgaaaaagatgaagaaaagcatcaaaagtatttgtcaaaaatgcgtaataaataattttcaagttataaggacgatgactagaaactgtcaaatcttttgtgtaaatagatctttctcgtaaattgattttttaattatttatttaatcaaagtaggattctaaggtgtcctgaacctgaccaaagcctttatgaattcgattgaaataacggtcattgtagctcattgcctggatgccaataaatgcatcaagcgactgttcagttggaaattctgccttaggcttagctttacgcttgatgacgttgttaaaggattcaatcatattggttgaataaattgaagctctgatttgtttgggataattgtagaagactagcagatcgggctcaatttccttcaaacctttgatgacatggctataagctttattccatttggcatagaatttgtgcaagacagctgcagcttcttttttgtttgtctgttgatgcacctgtttgaattcgttcatgatcttttcacgatcgtcgacgcgtactttagcgcagatattgcgcatgacatgaaccaaacagcgttgaaaatgagctttaggataagtcctggccaaggctgttttcatgccaacaacaccatcagaaagaaagagttcaacttgcttcaagcctctggacttcatgttttgaagcatctctgtccagacttcaatgttctcactaggagcaatgcagtagtcaatgacttccttatgtccattaggtttaatgccaatggcaatatagactgcttcacgctcaaacgtttctcggcgcaaaggaaggtatgtcgcatccaaatagacgcagaaaaacttgtcgcttagcttgcgtttgtggtaagcctcaacctttggaatcatctgcttggaaatatttgatacctgagctggactgtaatggctgccatacatcttttcaattagatcggctatttccctggtggtcacgccattggagtaaagcttgataatcatgctttccaagatatccgagtgctgcttgtagtcaggcagcgtgtgctgatgaaattgaccgttgcgatcccgaggcacttgcacttcaattgggccaaattgcgtatcaactttgcggaaataagcaccatttctagagttgccagtattccagccatttctggcatagggatcatagcccagaaaggcagtcaattcagcttctagcaagttattaacagcctgttgtagttctttgcgcaataaatcatttattttgtctggattgaatagagcttgagcaaaatctttggtaaaatcattcatgaaggagttcttctttctgtatgtgtttttttgttcaaaccaatcatacgagaaaggaactcctttttctaatgtttaaagaaataaatttaaggaatcattcatccttacacaaactattttacagtctcgatgactatccaatatcgcccttattttttgatcaattaagactttttagtctgcttttaaatctatttttcaacttatacattatgaaagcccatctcctcttaataatatttagtgctaaactgttagatagattagtattagaaaagagcaacaacaaatgagtaatcagaaagctaaaataaataataccgaaattaaaactagagtatctcacttcagaccaagccagtaaaaaaattcaagttaacataaaaggaaaaccatatgtctgaagagataattaacacagtcacaacaaaaaatgattttaagagtgcattaagaaatgcgggtattaaagatgatgataccgtattagttcatactgcactaagtaaattctattacgttcctaatggtccagaaaccattgtcgaagccttaaaagaagctgtgcctaatggaacaataatgatgccctcacaagtttctacgaattgtgatccagccacttgggaatatccaccagtacaaaaatctttgattcaagtagttaaggatgctatgccaccttataatcctacaacatcaatgacagaaggcttaggggttacgccagagtatttcagaactttgccagatgttgttcgaagtacccatccttacttgccaattgctatttggggcaaaaacaaagtaaagattgcacagaatcaacctttaaatattccttatggaattgacagtcctttagattatttgtaccagaataatggcaaaactatctttttaggcactgattatgaaacgtgtacagttttgcactatgcagaatccacaattggtagaaaaaccgaaacatgttctgctgcaactagtctggatgaaagcggcaaaactatttggactgaatatcaaaatattgatatggattcatatgatgactttaatgaattagggacagagtttgaagcaaagcatccctctgctatcaaaaaggttaagttaaacaatggtgtcatcaaagcaataaatgtaaaaccgctaattgattttgctagaaaatggtttataaaaaaagacaataatcattcaatttaataataaaaggaagaagtcactttcaacttcttcctttttctttatttaatctttgttaaaacctttgcacctatatttaaacctacactatgcgatttaccgccccaatcacgttcatcataattatccatatcagctaaagtatctgcagtgaaaagaaattgtgcaaaatcaatctttctaaactgagcacatgctgctaaagctgcacattccatttctacagttgacgcgcctaactgacgaaattgtgccacttttttaggcgtttctctaaagaaaccatctgttgtccaagtcgttatctcgtcatattctatatttagctcaactaaaatcttttctacttccttcaaaaatatagaatctagttccacaagttgtccaggattcatatagtgaaaagatgtcccttcatctcgaattgcacgtgttggaagtagcatcgcattttcaggtaaatctactaaggcacctgctgttccaatggttaacaccttttctactccataagcaattagccattcaagcaactgtacagctgccggtgctcccaagggcgcttgacacaaagtgaaaaattcgttattaatttgaacttcataaattttaggattaaaagaacatgactcaaattcacctaaagtacggtgaaaatggtgatctaaaaatgcattaatttctttttccggcacgaatgcgtaaagcaatcttggatgaaaatgaaatggttcttgatcgtgatttggttcaagaaccgcatgaggatgtttgtcaaagtctaaaatgaatggttgtttgttcatattttacactccatttttagttgaaatattatcataaactcgctaatacctgagatccaatattcaagctaacgctatatgaatcatggccccagttacgtttatcatagttatccatatcagctaaactatcggcagtaaacaaaatttgtgcaaaacttatatttctaaattctgcacaagcagctaaagctgagcactccatttctacagtttttgcacctagttttttagcttgcaaaacttgattaggtgtttctctaaaaaatccatctgttgtccaagttgttccctcttcatattggaaacctaaattttttatttcattctcaactcttcttacaaaatttttatctaatacgcatggtgctagttaaatcgttttagttaataaaaaagtccaatcttgttagactcgacttgtaaatagtaataatagaaaagagtctgatctgattgaactgccttaagcttaagcgttttagccaccatttacaagttagttttaaagatttagtgataatttgtcggcactggtatcgtttgtatgcaccggctgagtttactcatcagcgaaatattgatcaaattaaaactacggacagtctgattttggctttacttatctggcaagctaagacaggaattgaatcacaaagaagattctgtgaatgtttcaattgtttatcacactcacgttttaatcggcgttcacgtcagctattgcaattgatttatcagatacggcaagaaatgaataaaaaggttgacctgaatggacatttcttgatcattgacagctttccggtacctgtttgccaaccaattcgcaactatcgtgctaaaatttttcgcggttatgccaacattggttataaggccaccaagaaaatttacttctatggtttcaaagttcatgccattgttagcgatgacggttccattcttgattatgtcgtaacaaaagcatcagttcatgatgccaaggagacagttgaactgctggaaaatgcccatccatctaattactatcttcttggcgacgaaggctatttaggcaaagaactgcatcaacagctaaaacaaatgggttatgaactttggacaccatatcgtaaaaatatgacaggagctaaaaagcacaatgatcatcaattgatggctattcgcagaacaattgaaagcgacttttcgcttctgacctattacaatgccgagaacaatcgagcacgtagtctgataggctttcaaagccggttggaaattgcaattttagcttataatttggcttattgtctagaaagatttaactagcaccacgcgtatctaatgcaataatcttacttggttctttgtagtaaaaagatgtcccctctccgcgaatcgcttcttgagggacaaacatcgtgttttcaggtagattatccaaagctcctgcgtttccaacagataaaacttgtttaactccataattgatcaaccagtctaaaaactttgttgaagctggtgctcccactggagcttgacataacgtaattagttgattattgacttccacttcatatattttaggtctaaacgaaacagttttaaatttgcccagagtcttatgagagtgtttatctaaaaacgagttaatttcatcatctgggacaaatgcaaaaagcaatttttcatgaaacttatactctaaattttcgactccaggttctattacagcttttttacttaaatcaatatctaaaacaaatgatccttcattcatatacgcgtggtgctagttaaatcgttctagacaataagccaaattataagctaaaattgcaatttccaaccggctttgaaagcctatcagactacgtgctcgattgttctcggcattgtaataggtcagaagcgaaaagtcgctttcaattgttctgcgaatagccatcaattgatgatcattgtgctttttagctcctgtcatatttttacgatatggtgtccaaagttcgtaacccatttgttttagctgttgatgcagttctttgcctaaatagccttcgtcgccaagaagatagtaattagatggatgggtattttctatcagttcaactgtctccctggcatcatgaactgatgcctttgttacgacataatcaagaatgtaaccgtcatcgctaacaatggcatgaactttgaaaccatagaagtaaattttcttggtggccttataaccaatgttggcataaccgcgaaaaattttagcacgatagttgcgaattggttggcaaacaggtaccggaaagctgtcaatgatcaagaaatgtccattcaggtcaacctttttattcatttcttgccgtatctgataaatcaattgcaatagctgacgtgaacgccgattaaaacgtgagtgtgataaacaattgaaacattcacagaatcttctttgtgattcaattcctgtcttagcttgccagataagtaaagccaaaatcagactgtccgtagttttaatttgatcaatatttcgccgatgagtaaactcagccggtgcatacaaacgataccagtgccgacaaattatcactaaatctttaaaactaacttgtaaatggtggctaaaacgcttaagcttaaggcagttcaatcagatcagactcttttctattattactatttacaagtcgagtctaacaagattggacttttttattaactaaaacgatttaactagcaccacgcgtattcatatatattctcccttaatcaataaatggatagtcttcattaaagtaatgatcaataaaaatttgatgttgcttgttaaaaatcttggataatttatctttagaaaaatacttcagatcaagagtttcagagctaatctcttttgacattttttctactaattcaacagttactgcctgtgccacatcttgattaggataatgctggataaaattagttgaaacgcctaatagtgacttagttcttacttttaagccagtttcttctaaaaattctcgaacgcatgcttttggagctgattctccaaattctaaagcaccaccaggtaagccccatgcattaaaatctgatcttttttgaagtaagatttcattcttgctattagccaaaattccaccagcaaaatttagaataattggttcatgaccaactttttggcgtaaggtcttaatatagtttttaaccatcgctagtcctctacttgaatatcattcatcacaatttcaacttcatcgtctaaattaatctgactagtaaaagcatactcgggaataaaaccaagataatctttttcattccaccatgagcgcattgtttcttcaccaaaagaatgttcatgacgagttttatggcgtttcattgtttcttcaaacggaatatcaaaataataggcataaatttgatcaccaaaaagctgctgagattttttgaataaatcagcataccatttcgcattcaagataccttctaaaatagtgtaagaacagtgatgataaccatactcaagcaagttttctaataatggcaaagcaaatgtcttttctccgtctttaacattcagcatttctcttctaactgtatcttgtggaatcaatagtgtattgtgtggcaatcgacgatggatttctttagacagtgtagttttgccactgccagagtttcctcgaattataattaattttgatgtcatcatagaaatcttcactttcttaaaattaattcactgcatctctaattgttgcaaacttatcaaatgtataatctattataatctataccatgaattttaacaataggcagcattttccctttttgtcccatcaataatcctgcagaagcggctagcatgtcacagatagtttcaacattagttttatcttgatactgactttttcttaaaccagaaacaccatacaatccaattgctacttgagttgcaccttttttatcaattcttccatcactatcggtaattatgatagctactctgacttttaattgatcaaaaatatcatcactaattctcttagcaatttcatcacaatttttaggtaaaactattgcagtaccagcatcaattttatctacacctgcactagttaaaaacaaaccattcggcaaccacccaccaataaagttcttagatatctttagtttcttaccactcttatcttcggtttgatcaattataatctgaattagtcttggagcttttctaggtatttgctgatgcaaacgtaaggctaattgacttggattaatagaatttaagtgaacaaacagaccttcagatttagaaatcaatttagaagcaatacataaaacatcattatcgcgtatattaaatccttcatttttgattgtcctaattatttctgcacttaagttgcactttctctctattttcggaaaattatgcagcgcttcaattgtaatcatgactataacctcaaatcagatgttaatttgcccaaaacagtaatttcgtttctatcgcaatacttcaatgtttttatgatcggttaccatgatttatctggtatctttctcctttattaatggtattgttagcaaaacaacaccaaaatacactgcggatacaaaaaaacattacttttaagtctccaaatactttcataatactattgcttataaataatgaaatactaaccaagatctctgcaataaatgaaacagttgaaagcatagtcgacttattgctttctccataaatggcttcattactagtagctgaaatttgtcccgacatcattcccatcaatagttcaattaatagaaaaaggcaaagcagtaaatatttattttttagagtaccacttaatataaatgctccaatcatacttccagtattcaacaaagtaatcccttttgaattaaaggaagtagaaattttactaaataaaatcgaagagactgtaaaatattttgtgtaaggatgaataattccttaaatttatttctttaaacattagaaaaaggagttcctttctcgtatgattggtttgaacaaaaaaacacatacagaaagaagaactccttcatgaatgattttacaaaaaatatagcacaagctctattcaatcaagacaaaataaacgatttattgcgcaaagagctacaacaggctgttaataacttgctagaagctgaattgactgcctttctgggctatgatccctatgccagaaatggctggaatactggcaattctagaaatggtgcttatttccgcaaggttgatacccagtttggaccaattgaagtgcaagtgcctcgagatcgcaacggccagtttcatcagcacacgctgcctgactacaagcagcactctgatgttttggaaagcacgattatcaagctctactccaaaggcgtaactaccagagaaatcgctgacttgattgagaaaatgtatggcagtcattatagtccagcccaagtatcaaatatttccaagcagatgctccccaaggttgaggcttatcacaagcgcaagctaagcgacaagtttttctgtgtctatttggatgcgacataccttcctttgcgccgagaaacgtttgagcgtgaagcagtctatattgccattggcattaaacctaatggacataaagaagtcattgactactgcattgcgcctagtgagaacattgaagtctggacagagatgcttcaaaacatgaagtccagaggcttgaagcaagttgagctctttctttctgatggtgttgttggcatgaaagcggccttgaccaggacttatcctaaagctcattttcaacgctgcctggttcatgtcatgcgcaatatctgtgctaaagtccgggtggatgaccgcgaaaagatcatgaacgaattcaagcagatacatcaacagacaagccaaaaagaagctgcagctgtcttgcatgaattttatgcaaaatggaataaagcttatagccatgttatcaaaggtttgagggaaattgagcccgatctgctggtcttctacaattatcccaaacaaatcagagcttcaatttattcaaccaacatgattgaatcctttaacaacgtcatcaagcgtaaagctaagcctaaggcagaatttccaactgaacagtcgcttgatgtatttattggcatccaggcaatgagctacaatgaccgctatttcaaccgaattcataaaggctttggtcaggttcaggataccttagaatcctattttgattaaataaatgattaaaaaatcaatttacgagaaagaactatttacacaaaagatttgacagtttcctgcaatttgttttggatattcaaaatgtatatagtgagattcgcctaatgttataactttagatttaggattatttgaagtgtattctgaccgcttatattcattttcacgatacttttctgtaataacaatacttggtgttttatcacttatcctggtagtatttttccaaaacgaatcattttcgtaggctgcttgtgcgtttaaattatccttttcatcaaatttcttcgcattttgctctgtagttgtccaaaactttttattttcttctggagtaaaaatttctctaagatcagcttcaattttttcttgaagttttgccatgtttttatttttctcaatataagctggttcctttggaggatttaacatgatttctctagtagttggctcaattcctacaaaagccttcaaattattgattttatctttcatttgcatagcatacacaccgccaatgctatgagccaaaattataactttttttgcattaaaatcgttaataattttagctaatttagtagcttcgtctgatactgtatagtcctttaaagacttgccactaaagccactattcaaataatctgatgcaaaatagccatacttattgggcaaagcttcaattacttttgaaaaagattgtgctgtatcaaaactaccaaagccattcaaaaaaacaactaatggatctccctttcgataggcaaaattaatcttgcctaattcagtttcaatatcgcttctttgcataaatttctccctttattaaaactttgaagtcgttatattttaattatttcttagcacaaataccttatgcccattttcatcatcttttaaatacacgaaactacttcgcttagctacattctgactagcggaattcttaggatgagttcttaaaatcaaataatcaagcttcaactgttcaaatgcgtatttcttaagaaattcgacagattcagtcataattcctaaatgttgaaaatcattagaaagccaatatcctacttcgccagattcatgattcaaattatgtaagtcaatcatgccagctggctgtccatcaactaaaataactaggttgaatgctgtaccatcaaccattttttgttgaaacattttaattgaatcggcttctttttgaacagaatcaattttgttggcccaaactaaccatttagaaaactcagtaagatttttttgaagttgatcaaataagtcttttgcttgccaagtctctggaagaactaattcgatttctttatttttagttagaaatttatgtaaaacaaaagcagtatgacacatttcggaaactgtcaaatcttttgtgtaaatagatctttctcgtaaattgattttttaattatttatttaatcaaagtaggattctaaggtgtcctgaacctgaccaaagcctttatgaattcgattgaaataacggtcattgtagctcattgcctgaatgccaataaaagcatcaagcgactgttcagttggaaactctgccttaggcttagctttgcgcttgatcacattgttaaatgattcaatcatgttagtcgaataaattgaagctctgatctgcttgggatagttataaaagaccagcagatctggttctatgtctttcaagcttctgataacatggctgtaaaccttgccccatttggtatagaagtcatgcaggacagctgtggcttcttctttgtttgtctgttgatgcacctgtttgaattcgttcatgatcttttcacgatcgtcgacgcgtactttagcgcagatattgcgcatgacatgaaccaaacagcgttgaaaatgagctttaggataagtcctggccaaggctgttttcatgccaacaacaccatcagaaagaaaaagctcaacttgctttaagcctcgggatttcatgttttgaagcatatctgtccagacttcaatgttctcgctaggtgcaatgcagtagtcaatgacctccttgtgcccattaggcttgatgccaatggcaatatagactgcttcacgctcaaatgtttctcggcgcaaaggaaggtatgtcgcatccaaatagacgcagaaaaacttgtcgcttagcttgcgtttgtggtaagcctcaacctttggaatcatctgcttggaaatatttgatacctgagctggactgtaatggctgccatacatcttttcaattagatcggctatttccctggtggtcacgcccttggagtaaagcttgataatcatgctttccaagatatccgagtgctgcttgtagccaggcagcgtgtgctgatgaaactgaccgttgcgatcccgaggcacttgcacttcaattgggccaaattgcgtatcaactttgcggaaataagcaccatttctagagttgccagtattccagccatttctggcatagggatcatagcccagaaaggcagtcaattcagcttctaacaagttattaacagcctgttgtagctctttgcgcaataaatcatttattttgtctggattgaatagagcttgagcaaaatctttggtaaaatcattcatgaaggagttcttctttctgtatgtgtttttttgttcaaaccaatcatacgagaaaggaacccctttttctaatgtttaaagaaataaatttaaggaatcattcatccttacacaaactattttacagtctcgcctgcggcatcatatcttgaatctgcttcttggcccgctttaatatttttcccggccatttttaccaaattgcccacctgcatatggctaatattaaagccagacaggcaattgactgctagagcagtattgcgataagtggcaacgctgcttacttctaagatgtttttgactgctaaaatactgtagcgcttgtatttgtcaaagcccattaattcatccaagggataccttgcttgtttgcctgggcagacatatcttcttctgacatacctaacttcgccaaaagccatattgattgagcgctcattcttcttatcaatctgatagccctgtgctttaaccttggtaatcatttcatcatcaactttagctaaagccaaggccatgatttccttaatcaggtttaagaagaaacagattatttttctttcacgcttaatataattatcttcagactttataatatttgcgatttcagttacaattgaattcataaaagaccagcttctaatgtgttttttgttcttaacatcagactactggtctttttgtttgagctcaagtccaaattcaaaggacttgggcttttttaattatttattcaacttaccgtaaaaaattatacacttagtgacgaaatttttgctattcaaagtgctcaaaaagagacgcgtaatcgttatctaaaaaaacaaaaagctatgttggcagaacatgatcttttacccgaaaaaaagcgcaaaccacgtgcccgcatgttatcagagctgaatttaaacaacgatgatgctattttaacttttgccaataaagttaaggttttcaccagtggacccgagttgtttgaccaaataattgctgatcttaagcaagctaaaacatcgattagtttagagttctacactttttataatgataatctaggaaagcgtgtcttacgggccttagaagaggcttctgctaaaggagtaaaagtcagagttatttatgatgtctctggctcacgtggtactaaacctgctttttttaatcatttaagagagcttggtggcgaagcacagcctttcatttctacttctaaaaagcattggtttactacaccacgactaaattatcatttacaccgcaaattaatcgtaatcgaccatcatattggctatattggtggctttaacatcggtgatcagtacgttaatcaatctaaaaaatttggtcattggcgcgatacacatttacgtgttgtgggtcaatcacctatcctaatggagacacgctttgccatggattggaatacttctatcagacgaactgcattacctaaatttgatctaagcgaattacatgcttttactgtcgaacgtaaagatcttgacaacgatgataacgtagcaatgcaaatcgtttcttcaggtcccgataaccaacattatggcattcgccgaggatatgagggcatcattgctggggctaaaaactatatctatattcaaacaccctatttaattcctgaagaatccattttagaagcattaattattgctgctaatagcggtgttgatgtacgcatcatgatcccttgcatgccagatcatccctttgtttaccgagctaccgaatattatgcaaaatatttagttgctcatggcgttaaaatttacaaatataatgatggcttcatccatgccaaaacaatggtttctggctccaatatctcatctgttggttcagccaatcaagacttcagaagttataccttaaacttcgaggttaacgcttttaattacaatattcaattaactcaagaacttaaacaaatttttgaaaaggacctagctagttgcagtcttctaactaatgaatactttaatcagcaatctaaatggcttaagtttaaacaatacttttcacgtctgttggcacctattttttagaaataataaaaccacgaagcaaaaacttcgtggtatttttttacagattattataaagatcctgcatttcatcatcttctggagctaacttaagatatctttctagcagttgttttgttatttcatcattattttgtacattaaaaaagatcctgaattgtcaaattaagtgcaacagttaggttatgaagagatatattgcttgaagagttcctctgctgtgtgatattggaggattcggcgatatttgtggttaatggcatcagttgcctgttgaacataagcttttgacttgtctttcatgctcttgcccttagggaagaattgacgcaaaagaccattgcagttctcattggtgcccctttcccatggagaatatgggtgagcaaagtaaatctggcagcccttgatcttggtcatatccgcaaactcagagccattgtcaaacgtgattgatttaaaccaggcaggatgtctgtcaatctccttttgaagcagcctttggcatgtgcttgcccgatagtcaggaatcttgataactacttcaaagcgtgtggttctttcagtcaaagtcattaaagcaggctgattcttgcgtctgacgcctttaaccagatctccttcccagtgcagcggagcttttctgtcttcaatctctttaggacgctgttcaatggaattgccaagatgcttcttgtgcaaagcgtgaccgccatggctgtgatgacgcttgttcctgcgtcttttgagcttcataggcagatcaatattgcttatgtccagcaagccctgatcaatatagcgatagacggttggtgtgctgggacaagggtagcctggcatagtccttttgaattcaccaacgaactcatcgatgctggtggcatcaaatttagctttaaagcgtctggagagcattctcaaaaagacagcataatgcttcaatggattgcgctgatagcagtttttgcgacgcttctcataataaatctgtgcagtatcagcgtaatagtgctcatacaataaatagctgctgtctctttgcaggacgcttccgcgtttgatttcgcgactgattgtcgacttatggcagccaacttcttgagcgataacagtacgggaagttatgccggaatccagcattgcttgaatttgtccacgttgtacgctggttaattgatgatagtgcttagaaatgctagaatttgaattggtcatgaagatcttcctttcttgatttttcgtcacttcaagtttaggtcttcatggcctttttgtttaacacttagtgttgcacttcaattttaaatccgggacattaaaaaagattatcatttggcgcaaaaagtctggattatccttgaaatccggataagctagtaaaaattcgctctgtgctttctgaatatcatccaaatcctcatatgataatgccatattccaatgtgcctgtggctccacgctttcctcatctaagttactaaataaggcaatattctccttagcctggtgttcatgaacatataggttagatagctgcatacgtaaatcactattgtctggcgctacttttaaccccttttcaagtaagtcacgagctgtatccaattcattcaaattagctgctgcacgtgctcccattgaataaagtgtttcatccagttcattgtacgctaatcctgcttgagcagtcctcaatacttgttcattgtcatgctgatgatcataagcttgtgctaataatggatacgcatttacatagtcaggactttgctcaatcacttcatctaagaacttaattgcctgcttatcatcacctacagataagagaactaatcctgcttcatacttagaatcaatatctaaaatactatttgcatgtttacgaataactttggcagcttcttcataattacctaatttggcaaaagtcgcaaataatctttggtacagatttacttcactaaaagtactttgacgtttgattaaatcttgatataactcaagtgcttgttcataattaccacttaaatattcaatctctgctaaaccaaatttaatagcatcttcttctggagctaattgtagtgctcgtattaatttgtccttagctgtttctattaagccgttagtttggtaataatcagcttgtactaatagactatctaaataagctgaagagctctcagggacattatataaaagcgacagaccatcgtcatcatcgccatcatttaacataatctctgccaagtaaactttaaataaatcttctttaggaaatttagctattaaagctcgatatatttcttttgctaaatctgtaaaacctaagccagttaggttttctgctaaagatgacaagacctcgggatcatcattatctaaagcttcttttaaaaggtgtttgttttgtgaaaaatcatgattttgaattgcatctagtaattgttcagaataactcataatacctccaatcaagttaccattgtactaaaaaaagacgccggaacaaagtccaacgtcctatcacattagttaagctattacttaacggcatccttaagagctttacctggcttaaatgcaggtacttcactagctgggatttcgatttcatcaccagtttgtgggttacggcccttacgagcagcacggtgacgtacttcaaaagtaccaaaaccgattaattgtaccttttcacccttagcaaggttttcttgaattgaatcaaggatagcatcaacagtatttgcaacttgcttcttagttaacttagtttttgaagcaacttctgaaactaattcagccttatttgccatgaataattcacctcctgaatttgaacctaatgttcaaaaaatttttctttgtttaagctaaacaaggaaaaatgatcacaactaatcatgtttcctaaaaacaaaaatatcacaaaagccttataacaacaaggtctttgtgatattttgcttatcttttatttacgtttacgtggtaaaatcttgattggtgtaccagtaaaatcaaagttttgtcgtaattgattaatcaaaaatcgttcatatgagaagtgcatcagttctgggtcattcacaaatacaacaaaagtcggtggattcgtacttacttgggtcatgtaataaacacgcaatctcttacccttcaccattggagttggaactaacttacttgcttcaagcaacaagtcatttaagacactagattgaattctttgattttgattatcatagacttctttaaccatattaggaatttgatctaatctttgacctgtcttggcagaaacaaaaagaataggagcatagtccaaatattgaaattcatctctaatttcacgttcaaattctttagcgcttgtactattcttttttggcaaatcccatttgttaacgacaatgatgattccacgacccgcctcgtgagcatatccagccacatgcttgtcttgttctctaatgcctgtacttgcatcgaggacaaggaaaaccacgtctgagcgctcaatagcactcatagcgcgcattacagagtacttttctgtcttctcatacactttgcctcgtcttctgattccggcagtatcaacgaccttaaattttacaccatcatgggtaaacggcgtatcgacagcatcacgagttgttccttcttcattagcaacaattacccgatcttcaccaagtaatttgttaacaattgaagacttacctacatttggtcgaccaataacgctaaaagaaataacatcatcagcttcagtatctttatcgtcaggaaaatcattaacaatctgatcaagcaaatcaccaataccagtaccatgactacttgaaacaggaatcggatcccccaatcctaaactatagaaatcataaatatcgcttcgctgttcaggattatcagctttatttacagctaaaataactggctttttagtacggtaaagaagatgagctattctttcgtctaaatctgtcacgtgatttaccacattggttaacatcacgataacatctgcttcttcaattgcaatttctgcttgagctctgatttcttcctcgatcttgccaccttcccaggtaataccaccagtatcgatcaaatcaaacttatgccccatccattcggcttgagcataattacgatctcgggtaacaccaggtttgtcctcaacaatagctaaacgttgattaattattctattgaaaagtgttgatttaccaacattgggttgaccaacaattgcaacaactggtaaaaccatttctcgccctcctttactaatctaaacataaataaaaaagccgactcaagtcggcttttttataaaatgactacttacggtcctttaattggtcaccaatgatgtcacctaatgcaaagccgttgtcgttatcactcatgtacttcttgtttactgaattttcgttacgtgaacgacgtggacgagaattatgattttctgaagaagcatttgagtcagcagccttgattgaaagtgagattcttctatcacttgggtcaatgttcaaaaccttaaccttaacactttgaccaacctttaaaacatcgcttggcttgtcaacatgcttgtttgagatttctgaaacgtgtaccaaaccttgaataccatcagcgacttcaacgaaagcaccaaagttagttaatgactttacttcgccttcaaaaatatcgccttcgtttaagtcagctgtagcttgttcaaatggagaaggttcagtttgcttaatagacagggaaatacgatgtctgtcattgtcgataccaatgaccttaaccttaacatcttgaccaacctttaaaacatcgcttggcttgtcaacatgcttgtaagaaatttctgaaatatgaactaaaccgtcaacaccaccaacatcgatgaatgcaccgaagttagtcaaacgtgaaaccttaccttcaacaacgtcaccaacaactaattgtgatgcaaccttgtcaaatgcttcttcacgttcttcttcaactaaatccttgtgtgaaaggattaagcggttcttgttaggatcaatttcggtaatcttaagtttcatagtcttaccaatataaggcttaagatctgaaacgtaacggtttgaaattaatgaggctggtaagaaaccacgtgtaccaacatcaacaattaaaccaccacgaactgatgaagttacagtaccttcgacagcatttccgtcttcgaagtctttttgtaacttgtcgtaggcttctctttcctttaagcgggtaactgagaagaagaattcaccattttccttgtcgccaccggctcttcttaatactaaggccttaaacttgtcaccaggcttaactaaatcacgtaagtctgcgttacggtctgaagtgtattcacgacgagtaatgacaccttcaacaccagcgttttcaacaccaacatcgatttggccgtcttcaatgtctaatacttcgacatcgacaatatctccgacctcaactccttgcatttgctttaatgcgtctaaaaattgattactgttttctgacatatgtacctcccaatatcatgtcccattttataggaaaccgagatatttttctactattttgtgctattttttctaatttttttgttttttttcgatttgagctaaaattgcctctacaacttcgtcaatcgacatgtttgtggtgtcaatttcaattgcatcatctgccttttttagcggtgaaattttgcggtgagaatctttataatctcttgctgcaatatctttttcaatttcatcaactgtttggtcagatttaataccacgctctttaaaatctaataaacgacgttcagcacgtgatcttgctgaagcaactaaaaagatcttaacttcagcgttaggtaaaacagtcgtaccaatatcgcgaccatccataatgacatttgtcttgcctgccatttcacgttgcagacttaccattttttctcgtactttcggcaaagcggatacttccgaaacattagctgaaatttcaggcgttctaatttctttagaaacgtcctttccagctacatatactttttgctcaccattttcagatttcaattcaattccatcttcatcaatggcattcaagatacccgcttcatcaccataatctaagttatgattacgagcaatcactgtacatgcacgatacattgcccctgtgtctatatagacaaaggataatttacttgcaatgattttagcaactgtacttttacctgctgatgcaggaccatctactgctacttgcattctaataaaaaagagatcttatcatcgaccccttttatcctttctgaaagattatttcaacttaagtgtctgacctgcttcaatatttgaagagtctttaagattatttaatctggctaattcatcaacagtcaagccattcttttctgcaatttcatttaaagtatctccactttggactaaataagtcttaggagtagcagaactactagatgagcttgaactagccttttcagactttttcttgctaaaagaagatgatgaggttttcttagtcttaacagacttggatgatttagaagaaaccttcttaactgtttgaacttcttcagctttttctgaatggcttgaagccaaacgatgaacaactgggataagtgcaattaaaataaccgctaaaattataataactgctatccaacgtgctgatccactaggctgactatcttgtgagcttcgcttttcagtaggtcgttcatagtgctgatatggcccggttgactttttatccatcaaaaattcctccattcacttaacggattaattttagcatattttaggatgctttgaatatgaaaaatcccatcaacttaaaaaattgatgggatgataacttaattcaaattaaatctcttacgaacgaatggcttaattgttttcaaggtagcttcaaacaataagtaaacagccacagcgttaattaatccttttaacaagttaaagggcatgataatactaaaaatgtaggttgacattgatggtaaatgcaataactgacccaagtaaactttctcagtaaagcttaacaaggcactatagctattaatagtaggcaagtttggtaccgctgttactgcgtaaataggagtcaaaacggaggcattagccaatgacatcactgctgccattgcgataatcccaattaccaaaccacaaattggtttaactctgcccatcattgtcttgcggttatccgcactcacatttttacttaataaataaaatggaactgcaaatgacattgaagctaagaatgctgctagatttccaacaaggcttggtaatgcaaaaccactaaaaattaaactaagcaacattcgaattaaagcaataataactcccggtacaatgccaaaaataaacattccaattgtaataatgacatctgaaaaatcaaactttaagaaggcaactccaggcatgattggaaattcaaatttcataactacaaaagcaatacagccaattaaagcatatgcaatcacattagttaaactactattcttggatttagcttgatccataacttactttccttttccaaaacaaaaggtctattgcttcagcaacagaccttaaaaagtgtagtaagtttttttagcctgtcttcttccatctagactttaactatcggtatctaacgattcaaccactgacgtgggtcgcggactttcaccgccggtcgggactttcaccctgccctgaagacaataaccttgaatatttaattacagttataatttagttcaattgcattaatttgtcaacttcatgcttcgataattcccgatattgccctgatgtaagcgaatccagagttaaaaaggcatatttttcacgagcaagcttatcaactaagtgacctactgctttaaacattcgcttaacttgatgataatgtccctcatgaattgtaatttggacaatttgtgtgtctttcttatgatcagttttcaatactttgaccttggcaggcgcagccttaaaatgatccaactttactccttgagtcaaggttttaatttcatcaggagttaaaatccctttaatcttggctacatagaccttagccacttcatttttagggtgcatcaataaatttgctaatttgccatcgttagtcattagcaataaacctgacgtatcataatctaatcttcctactggatacaaacgatatggtaaatcttcgaaataatcaactacagtttttctaccacgatcgtcttctgcagtcgaaacaacgccacgaggcttataaaacaaatacgtgtgtaggctttcccgctcaattggctcatcatcgactgtaatattactaaaagtatcgactttagtacctagcttagtaacaacatgcccatctactttaactcgaccggctacaatcattttttcagcttttcttcttgaagcgattcctgcttccgcaattactttttgtaatcgttctgccattttctatccctctttttctaaatgtttgtctgcgctaccttttgaatcgaataagtcaatctcctcaccatcagttgtatcctcaaagtcttcgattaacggtaaatcagccaaactttgataattaaaatattgtaaaaaataatcagttgtaacatacaacttaggatgacctggagcatcttttttgccgtcttgtttaattaatcctcgccaaatcaatgtctgtaaagctcctgatgaatttactccacgaatatcatcaatttctattctagtaattggttgtcgataagcaataattgagagaatttcaagtgctgattgactcaaattcttagttaaatctttttgaaaatgcttttcaattatcttagctgtctgttgactagttgtcatcttataagtatttgcaatatgaattatttgcattcccgagtctggatcagccttcattttttgctgcaaacgagtgactaactgacctagctcttcaccatcaacttcaagtagttcaattagattttgctcctcaagcccattgtcacctgcgacatacaaaagagcttctaaatttgctagtttacttgccattcgtatcaattctttctaaatttaaatcaccgaattcacgtgcttgtgtaatctgaattaattgttttttacacaattctagtgtcgctaaaaataagccaataacatctgagatattctgcattttgtccgcgcaagcaaagaaactaacttgcctttttcgtttcaattgtccatgcaaaaaatccatcatctcattgatcggcgtttctgctactctaattgaagcggtatctggttgctgcaacttcaaacgatgtaagaccatcgtaaaagtcgtcgctaattcttgtgcagttatctgacccttaggcagcggttgaactttagcagtggttgatacactagcttctttagcaactgtaatcggtacttcttcattacgttctttaaaataagcagatattttcttaaacacagaatattgtaccaattgttgcactaattcgtctcttggatcttcatcaggttgaatatcatctacaaaatcgttttgaggcaacaaatactgtgatttaattcgcaataaagttgatgacatgacaaaatactcgcctgcaatttgtaaatttaagctttgcatttggcgcaagtattctaaatattgactagttatttgggcaattgggatatcataaatatcaattttttgcgattggatcaaatgcagtaataaatcaagtggtccttcaaaattcggtaattctaaagttaagttacttttgtccattatcttcttctatcgtttttaataaatttgtatattctggtacagcagttattcgtttatctggatattcgtgctttagttcatcaacaattttccgttcataactaatctcacgaaaaccaggagctaaagacaaatatctaataattacaaactgattagatacttgggttcctattacgcccaccatattattttgactattacgataaagatacaaaataaagtcattttcatcctgattaagcgtgatttcttcttttaagttttcgatatttttaaaatcaggtaaataggatagtaatcccattgctatcttctcataatcttttttatattgtattagcatttaatcacctaaagacgaggatgtgtcttctgataaacatttaaaatttgcttttgtgataaattggtatagatctgtgtcgtgctaatatcagaatgtcctaatatttcttgcactactcgcaaatctgcgccgttttctagcaaatgtgttgcaaacgtatgacgtaaagtgtgtggcgtgacatctttagtaattgccgccatttgacaatactttttgatcatctgccaaatagcctgtcgtgtaatcttttttcctcgattatttaaaaaaatatgttcatcgcttttccctacttgtaaaattagcggatcacgaacttcattttcatatttttttatccaatcaagagcaacaggactaattggaatcaatcgttctttttcgcctttaccaagaacccgaactaagcctaaatcgtcatgtaaatcctgcaactccaaattaattaattcgcttactctcattcccgtggcatataatgtctctaagatagcacgatcacgtatacctaactttcgtttagtatttggctgctcaagtagcctattcatttcagcttgagagagagctgtcggcaaacgacgttcttttttaggcaaatcgatttccaacattggatttaacttttgaatattttgccgagctaaccattgataaaatttacgcatgctagaaataagtcgactaattgagctggttgctttgttcaaatcacgctgccgagctaaaaacgcatccacatcgcttgcttcagttggccatgaagccataccttcattttctacaaaagtttgaaattcttctaaatcttgacgataagcattaattgtattatcacttaatcctcgttcaacttgactatagcgtaaataatcatcaatttgatcttttaaattaatcttctccattatcgttctcttctggatccttaattaaagtaatcgtacctgctgttttatcttcttcaattaatccagccttgagcaaatgaccgaccgcacgtttaaaagctgattttgaaataccaaagtatgatttaatttcttgtgcacttgatttgtcatagaaaggtagagtcttggtttctcttctccgcaaactcatcaaaatcatttgcgcatcatcatcaatttcttcaaaagcacgaggcaaagcactcaaattcaaacgtccatattgactgacaccgactactctacccttgaattgctcacctagtctcataggacgtggcatctgcgattcatgtacaaagccaagataataatcactagttaaaacaaatgctcctatctctcgtgtaacataaaccgttgcaaagacattttcattattcattccacgtggaaagttagcagctaattggtcaaaaatattttcatctgctagcttagcccaaatacgatctttttcgtcagtttctaatcttactaaaagtcgatcatcacgtcgaggccatctttctttttctctaggaagatcatccattgataaaacaacgtctttatcaggtagacctacatcaacaaagacgcctaagcctggacgtacctcggttacttttccccaaccatattgatcgggttgcgcgaatggcaaaaattgtgtcatttctcgatcatgacttttattatcataaataaaaccttcgacttcatctccaattttaggaatatcatcttgcgtaatctcgatcttcttcaattcataagtcagtccatcaatttgaacataataagctttatcgttttcgtcagtaatttttcctttacgaactgttccaagcatttaaaaatctcctactttacatattcttacatataagtataagagatttttatgcaaaataaaatagccagcacttaagctggctattttttgattagctaatctatctaaattatattcttaaaattaaaggtttgaaattttgccttggtagatagcaccacgacgagcgtcaacagtaatagttgaaccatcagaaatcttgtcagtagcgtcagtagcaccaacaacaactgggatacctaatgataaaccgataactgcggcatgtgaagttaaacctgaagcttcaacaactaagcctgaagccttcttgatagctgggttgtagtctgggtcagtagtcttagcaactaagatgtcgccttccttaaccttgctatttgcttcttcagctgagttagctacaacagccttgccgataactgaaccgttaccaacacctaagccttgaactaacttgttaccgatgatttgtaacttcattaagttagttgtacctgagtcaccaagtggagtacctgcaacgataattacaaggtcgccatcctttacgtaacccttttccttagctaccttagcagccatttcaaacatgtcatcagttgacttaggcttttcagtcaatactggttgtacaccccaaacgatacccaatgagtgttgaaccttttcgtcaaaggtcatagcaataatgtcagcattgggacggtacttagaaatcatacgtgcagtgtaacctgagttagttgcagtaatgatagtcttaacacctaattcttgagcagtacgtacaactgattcaccgatagcttcagttacgtttgaacccttgtaagcttcgaatctttgaagagctaaagtattacgcttaagcatttgcttttcagtacgttcgtcaatttcagccatagccttaacagccttaactgggtaaagaccatttgctgattcacctgaaagcatagttgcgtcagtaccatcaagaacagcgttagcaacgtctgaaacttcggcacgagttggacgtgggttttcttgcattgagtcaagcatttgagtagcagtaataactggcttaccaagtgcgttagccttgcggattaggctcttttgtacaaatggaacttccataaatggaatttcaacacccatgtcaccacgagcaaccattaaaccatctgaaacttgcaaaatttcgtctgcgttgtcgataccttcttgagattcaatctttgggaagatcttaacgtagtctgcacctgcttcttcacaaagcttacggatgtctaagatatcttgagccttacgtgcaaatgaagcagtaatgaagttaataccatagttcaaaccaaacttaatgtcatcagtatccttttcagtaatacctggaaggcgaatttcaacaccaggagcgttaacacccttctttgaaccgattacaccagtgttttgagcttcacaaacaagttctctctttgagtcgtccttttccttgatcaaaaggtcaaccaaaccatcatcgattaatacgtgaccaccaacgtgggtatcatcgtataaaccgtcgtaggtaacgtggatcatgtccttgttacccttcttagtggcatccattgatacacggatcatgtcaccagtattaatagtgaacttgccaccttcttgttcagtggttctgatttcagcacccttagtgtcaaggtcgataccaagaagtaaaccagtatccttttccacttgacgaaccatcttcatacgagcaaggtgttctgggtggtcaccgtgtgagaagttgaaacggaatacgtttgcaccagccttagctaaagcagtaatagtttcaatatcgtttgaagctggccctaaagtactaacaatcttagttttcttcattattaaaaaaatcctctccaaaaatcaactaaattaatatttagtcatttcttcatttacatccaataacgcataatcaccttggtgtttaccgtcaaacaaatcaagaatgtcgtgggtattaagttcaccattctccatgccgacagctaaaccgcccttcccatcgagaagtaacttaacagcataattacccatcttagtagcattaactctatctgtaacagtaggtgagccaccacgttgcatatgcgcaaggacattagcacgagcatcaaagtcaccatatttaaggagttcgtccttaaacttatcagcagccataacgccttctgctaaaacaatgataccatgatctttgccatctgcaaaaccacgagtaagagtttctgcaatttccttaacatcgtatgaacgttcaggaattacaattgcgtctgctccacttgctacaccgacacgcatagcgatatcaccacattcacgacccattacattaacaacgaatacgcggtggtgactgcttgcagtatcacgaattttatcgatagcatccatagcagtacgacaagcagaatcaaagccgatcgtgtagtcagtataaggaatatcattatcgatagttcctggtaaaccaactgagtttacgccgtggcgagtcaaggctaaagcaccatggtatgaaccgtcaccgccaattacgataaccgcatcaataccgtgtttctttaattgctcaacacccttttgttgcacttcttcttgtgcaaattcagggaaacgagcactgtacaagaaagtaccgccttcactaatcttgtggtcaacattttccgtggtaagcggaacaaagtcacctgcaaccaaaccagcgaaaccataacgaattccaaagacttcaagcccatgatggatagcagtcttcgtcacagctctaattgctgcattcataccaggggcgtctccgccactagttaaaataccaatccgtttcatgaattcacctcatcatgattattttgtgtaatttctcacatcacataaatattaacattttttaggcaaaaaagctcacaaaaattgggctaatttatgctttctttccgtatttaagtttgttagcacttacatccatcgtcaaagatagctttgtaatttgaactttattctttaaaattaacttttcgcaaattggttaagaaatactgttttttattttggtcaaatcgatcaccttgaaccttgactcctagtaaataaatatctccttcttttaaaatagagccaaatttttcataagccggtggaaaaataataatttcttgttcgctagatgtatcagcaaaactagcaaaagccattgtttttccatttttggtcctaatttgctttaacttcattaatttacccacgctaataccactatcatttaactgaaattgattcaatggtctagcgttaaatttttgtgcatatttttgtacagctattagaggagtagttgttgtagtaaagcctaaagctttctcttccatttctgctttttgggcagcagtcggtggctcagcaggcttaagtggtgcatcccccagaatctcagataaagacatattttgtcccgttaattgcacattagcaattacatctttgcagttaagcaataactcattgcgattatcttcgattgagtcaaatgctccagccataatcaatgcttcaattgcgtctacttgtaagaacttagcatcgattctacgcaaaaaattattaaaagacttatacggtttagtattggcagctatttccttagcaaaatcaagacgtaatcctttaattgcttttaaaccaactaaaatcttgccatcttgtaaagtatagtctaattggctgtgattgatatcaggcggcaaaatacgaactccagcttcctgagcttgcatcgaatagctttgcactttagcagacgttgatgaattgagcatcgctgtgtaaaatgcagcaggataatgaaccttcaaataagctagccaaaaggcaatcttggtatatgccaccgcgtgtgaacggttaaaaccatagttagcaaattgctctatataatgataaactcgctcacctacttctttaggatgaccttttttgaccgtaccagcaataaattttccacgttcttgctcaatgacattctgattctttttagacatcgcacgtcgtaaaatatcggcttcacccaatgaaaatcctgccaggatttgagctgtttgcatgacttgttcctgataaaccaaaattccataagttgattgtaaaatttgctttaaactgggatcaggataatgcacagtagccgtaccattttttcttgcaacaaatgcgtcaatattttgcattggacctggacggtataaagcgttcaccgctactaggtcctcaaaattgtcgggatgcaatttacgcaaaacaccacgaatcccaccagattcaaattggaagactgcatctgttttaccttgttgaaacagttccattgttttgggatcatttaacggaattgtattaggatctagctttacaccttgctgccgcactaaagctaaaatattgcctaaaactgtcaaattgcgcaatcccaaaaagtcgatctttagcaaacctaatgattcaacatattttttggtttgctgagttacaggaatgccgaaaggaccagcctgcaatcccgaaatgccagcaatcgaatcatcactaatcaccaatccagccgcatgaatagaataatgccttggcaatccctcaagtcctaaagcagtcttaaataacaatttattctcaggcgttgcatcaaccaataatcttagttctctagactcttgatatgctttttttaatcccattttatctttagagtacgggattgcgtgagtccacttagtgatttctggtcctgttaagccaaaaacccggccaacgtctcttaatacttgtttagcagccattgtaccaaaagtcaaaatttgagcagcatgatccatgccatacttttgatacatatacttaattactgtattccgttgaatatcaggaatgtccagatcaatatcaggcatctcatgacgagccggatttaaaaaacgctcaaacagtaaattatattggatgggatcaacttcagtgatacgcaaagagtatgaaaccagtgaaccacaagctgaaccacgtcctggaccagtagtaatttttactcggtgacaatagttaattacatcccatacaatcaaaaaataatcatcgaaccccatctgattgatgactcgtaattcataatttaatcttttctgatactcggctggaatacttttttgaccaaagcgcgcttgtaaaccagtttgagccaaataacgcaaatattcttctgaagtcggaaacttatcttgatgatatttaggtaagaccggtttttgaaagatcacttcagcattacatttctgagcaattttccaagtattattaattgcatcatccaagtcatattgatgatagcgttctaaaacattttgtgcagaatctaaataatgcgaaccagcttgcttagctagtggcaatatatcttgcaatttatctcccttagcaatcgcacgcaaagttttttgtaaaaattgctcacgtggccgtaaatattgactatcttccactgcaactaaagataattcaaattgcttagctaatccacggacataatcaatgtaatctatacttgcttttgaagcatatacacccaaataaagatcaaacgttaacttctttagttggcgaacataatcactgcctaatgcctgatttgtatcatgcagcgccattaattcactttttagattagctggtacgataatcaacaaatcatctaaatatttggttaattcattcagcgttaagaccttatcgttttgcccattttccgttaacaaatttaccgcgctagaaagtcgcaataaattatgatagcccttatttgttttggcaaaaactagcaaatcatatttttgggtgctatcaaccaaaccatttaaacgcagttgcatcccaagaagtggtttaattcccgcctttttagccaactcataaaaattgaccaaaccataagtcacgttcacgtcggctaaaccaaccacaggatagcccttctctttagcgtcttttatcaaatcacttaccttggttggactacttaaaagcgtaaaggagcttatgttttgaagtgctgctacttgcataaattaaccacctttcgtcattacaaacattaaattaagtataccaaattgaaccaatcaggtttgaatttgcgcttcatttttgataaaatcttacacgaaagaaggaatcattatgggtcgttatatcatcacaactgtatggagcgtaatctacatgttagttgtaggctttattgctggtcctttaacccgaagtgcttcattcaacggcacagatttaagaaattgtgtaatcgttgggatcatttttggtattcttttctcagcaattattgcgactattactgctcgttcacacaaagataatagtaaatacagtaagttaaaataattattcaatctattcaaaaaagacgtgagatgtttttattctcacgtctttttcgtttggtttagtaaaacttataattcttttttgtatctacttcgactggtccatgagtcaaatattcgctaaacatttgtacatagtccttatccaaagtggtttcaattttgtccatactatattcaggataaaatcccccacccatagcacgatagttgttaactgctaaatgataaatctgatcatctttgattggcttaccgtgcaaagttagtttagtcagccgttcacctactggtctggataaatccgcttcatattcgactggataaaagacgtcaaaatgatacaacattggcttaggcttaatccatcgatcaataaagccaatgtttcctgcttcatctttcttcaaaaagccagcagagtgctcaataatatgacgtaattctttaccagtcagcttcacacgacacaactgattagcatacggataatttaacaaaacatctctcatagtaatggtcttatcaaatcccttagcagtctcactcatcactgcagttgccgaaacatcagctttagtaaaccataattgcatttgctggattaaattaataaatggcgcgccttctattctgcctttcattgcattttcaattcgagcaggtttatctaaatgtgcaattggttgatctagccatttttgtgttcttttatccaagtcagatacaatatcaacaattacaggatcaggatcataatctttagtgtcaatcaacttagtggacattgatttgattttcttagtatcatcatcaatatcaagaaccacttcagctacagcttcaccgcgataacctggttgaacaatagcagtatcgcgtgtaaccaaatttaagcgccgatgctggtgacctgtcaataggacatcaacttctggaattttggttaaaatctgataaccttcattttcaccacgattaggttcagtcgccttaccagtttcaggatcactttcaaagccaccatgatacatcacagctaaaatatcaacctgagggcgtaatattttggcataatgcttaattttttcgtaagcagaggcaaactttaagccttttacattttctttaggttcccaatgtgggatatattgcgttgtaatccccaataaaccaatctttaagccatttctcttgataatagtgtattctctaccaaaaaatggaacttctgtttctgcatccagtacattatcattaatgattggtgcctcattgttatcaacatagtagcttaaataatctaatccaaagttaaaatcatggttacctaaacagcgagcatcataccccactgcattataagcttgcgtaaaaatacgtaaatcactataatcgccagttgaatgagcataggaagcaagtggtgagccttgcaaacaatcacctgcatcggtaactacaacattgttatcaccatactttttcttttcagatttaataactgagctaactctactcaaactaaaaggagcatgatagtcggttttattttggtaatcagttggcaataaaaatccatgtgtatcactagaatgtaaaaatactaacttcattatttctttttcctttttctaggcataaaaaaagacaccatatcaaaggtgtcctttaactagttattgctgttgtcgttgttatttacaacttgacgacccttgtaataaccctttggtgaaacacggtggcttaagcggtattcaccagtagttgcatcatagtgcattgctggaacactcaacttaatgtgaccacgacgtgaacgtttcttttgtttagaagtatgtcttgcaggaactgccatttaatttgatctcctttattgtagtcttaagcttcagggtcatataaccccgaatcactcacgtagttcaatcatactattcaattgctaataaatcaagatttattctattttcttctcttttttattgaagaaagtgaccttgtgatccgttttttccttagtatctcgtccaaagaaccaagcaataatcatcccgataatcaccattaccactaacacaacaattagtggtaacctcaccttaaaaaagccaaaattaattgcgacaggtgatgtatttaaaacaacaaaaattactgcaattaaagccacaactgatccaataattaaatttctttgtttttccatctttttttactttctagaagcaaactttaaggaaatcttatcaccaatcgatggaaatagattatacaatttagccgctacagctaaactaagtggtaaatttaattcacgtttatcactgccaaagaagtgaactacttgccaagcaacatcatctggatccaacataaattcttgaacatttttgacataatttccagtcttatctgctacattaaggaaattagtataaactggtcctgggtttacagtcattaccttgacaccaaatggctttaattctagccgtaagacatttgaaaattgaattacggcagccttagatgaactgtaagcggctgacttggtagttggtaccttgccagcaattgagccaaaattaataatttgaccagtcttttgttccatcatgaccctacctactaaacgagtaaagtacatcaaacctaaaacattaacttggaacatattggtaacgtcttgcattttttggtccataaattcttcgaatttaccaaaaccagcacaattaactaaaaagtcaatgtgttttacttgtttagtaattgcattaaaggtttgttcaatttcttccggcttacccatatctgttggaaaaacatatgcttcagcaccggatagttctttagcttctgctgcaatttcatctaattggtcctttcttctagcaattaaaattacagtagcaccacgaccagcactttcaagggcaatggaacgtccaatcccacttgaagcacctgtaattacaacaactttatttcttaatgagtctttcatttttctgagcctttcattggaatattaatctgatcaaaatcattaactaatactgtattagaaaatacttttttagcctgtttttcgagttttttccctttagcacccatataacgagcagaaatatgatttagacataataatttaacattatctttccgagcaattttggctgcttcaaccgaagtagaatgataataatcatgcgccaatttttgttcatcccctgcaaaagttgattcatggactaaaacatctgcatctttagccaaacgagcaatacttggcgtggaacgtgtgtcatagatgaccgtcacaattcttcccggtttagtaggtcctaagaaatttttaccatccaaaacagtaccatcagctaaagttactttttcgccattttttaatttccccaaaagtggcccattaggaacattatactgtgctaacttgtcaattaataattcgcctggatgtgaagcctccactactctaaaacccaaactaggtatccggtggtctagttgctccgtatacactcgaaagcccttatcctcacagattaaccctgatttagctaattcaacaaaccttatagaatatgaaattttagtccgagataccttaagagctgttctaacaaattcttcaataccactgggaccataaatagtaataggaccaacatcaccttgaaaagaacgagttgacaataaccctggtaacccaaaaatgtgatcaccgtgattatgtgatataaaaattttggtaacttttcgtaatttaatatttgttcttaaaatttgatgctgagttgcttcacctacgtcaaaaagccagatttcattcaattcatccagcaacttaagtgcaacactagaaacattgcgttgctttgaaggttgcccagcaccagtacctaaaaattgtaattccatgaaaatcctattctaatctaaaattttgaatgcttaacaattgttttggtaactaatgcactatagtattttgagccctttaaattagggtgagtatgatcaccgtagaaccagtcaggatgattcttcgagtatgaataccaatcaattattataagattatgataccgttttgcaccttgatttagcaaattattcactgaattttgccaatctctagttggaacgtgaacattaatccagaaaacttttctcttaggtccagcctgatgcattattcgatcaagatcttccattgagaaaggtccattagttcctaaccctattaagatattatctgctaaaactccttgactttgataactatctaataagccaaaagcaacattcaattgtcttgaaacagcagcatcaattaacgctttaggcattaatcgttttaaatcgttgctcgaaccggccattaccgagtcgccaatcgcagttacttgaacatgttgagcaaattgcaaatctaactgggaaataccatatttaacaaaggatttgttaataggatgctttttagtttgaagctcagcttcacgaataattttagattttttttcttttttctttttttctttttttaacttttcaattaatttagcattatccgttttttgttttttagaattctgattaattcgctgtgctaattggcttttattaaagtcttctgcttttactcctggtgaaatagcaatagctgctgatcctaagattaaaatcaaagctgctaaggctgcttgacctttcttaaagtaatcttttgtttcaaaattaaaaattcgagcaaaatattgcttcgttttatcccaggtaatcctacccattggtctttcaatcaaacgataagtaatttctgtaatcactaaaattaaaatcacttcaataaggtgatacagcattggattatcaccaatatttaccttatcttcaaaaaagatcattactggaaattgatacagatagatgccataacttcgcgatccaatccaatcaaataacctattagttaggatttgattccaatgactaccaggatgagcaattaccgctactaaaatacatacatctaaagtaaataacaacatcccgccagagtaagtaaaggcttgttgtggattcatccacttagagaaaaacattgctaacattaaagcaaatgaagcaaggcccaccaagtccagtatccagcctacttttcgttcaacttgctgatttaaactctctatcggccaaacaactgctaatgctgctcctaatcctaaagaaaagaaacgagtatcagttccataataaattcgattaatatcagcctttaaaaagtataggattgccatttctaatgcagaaacagctgatagaccaactaaaatccagaaaatattttttttctttttaaccaatttaactagtaaataaatgacaattggccaaacaatataaaattggccttcaattgacatcgtccataaattagtaaatggtgattcattagctgcaaaacgctcaaaatagctttgaccattatgaatttgccaaaaattaaatacatttaatagatttgcaagtacaacctgatttaatttagccagtaaatttcgttgaaagataaagatataggctgcacttaaccataaaacagtaattaattgtggatataacttttttattcgactcaaataaaaatgacgattattatatgatcctgttttatcatatgaattaaacatatgatctgtcaccaaatatcctgagagcacgaaaaaaatcggcactcccagatatcctcccataaaggaattaggatccaaatgataaagaattactccgataactgctaaggctctaaggccagaataccccgtaataaacctattttttttcataccctatctctactcttattgtacgaattcaaagacaaacttgccaatagccacatcatcaccattaacagctcctttttcacgtagtgcgtcatcaacacctaaacgcttaagctttcttgctaaacgcataataccgtcttggtgatccaagttggtcatttgaactaatctttctaattgttcacccttaacgataaattcatgttcgccaacttgctcaactgtaaattcattcttttgtggtgcctgatacttatattctttaatcttttgtgctagcttaggttgttcttcagcctgttcttgttcaacttcagttactaagttggcagtatctgacatcaacttatctacgcctttatgagttacacttgagatctcataaataggttcattatttccttctgcttttaatgcttttttaaactcagctagtttttcctcagcaccaggaatatccatttgtgaagctacaatcaattctcgcttctttgataaatctgtttcgtaatttttgagttcttttttaatggtatggtaatcatcaattgcctcacgaccattattaggatccattgaaactagatgtagaattactttggttctttcaacgtgacgtaaaaattgaattcccaagcctacgccttgactagctccttcaattaatcctggcaaatccgccattgaaaagtcacgaccatctggcaagataaccattcccaaattaggagttaaagtcgtgaattgataagcagcaattttgggcttggccttagttgttactgataacagtgttgatttaccaactgacggaaaaccaactaagccgacatcagccaataattttaattctaagcgcaaaacgcgatcttcacctggttcaccattttcagcaatttctggtgcagtattaacactagttgcaaaatggatattaccgcgaccgccgcgaccacctttagcaacgactagttcttggcccttttcagttaaatcaccaatcaattcattagtgtcataatcatatacagtagtaccaactggaacttttaaataaagatccttagctgcacggccatattgtgatttaatacgaccattttcaccactatccgccttaaacttacgccgatagcgaaaatccatcaaagttcttaagccgctgtcagcaacaaaaataatactgccgccacggccaccatcaccaccggctggaccgccattagggacgtatttttcatggcggaaagccaccatgccatcgccgccttttccggcttgtacttcgattttagtttgatcaacaaatgtaggcatgtatatctcttccttccgtcttaatctagcttttaatactataccacagaaatacgcatgatatcgcgttttctcggattacaatgttaattttaccgtttgtgcttgagtaagcgttaatcctgctctacgcaagtcatcaattgaagcttctttaattttcttcaatgaaccaaattcgcgcaataatttgttacgacttttaggaccaattcccttaatcgaatctaaacgactggacaaagcatttttagcatggcgtcttctatgaaaagtaatcgcaaagcggtgcacttcgtcttgaacgcgcgtcattaaataaaagccctctgatttgggattaaggggaatcagtttcaaaggaataccgttgatgggatcgccaaataataaatggtttgttctgtgcttatcatctttaaccatccccgcaactgggatattcaaatttaattcatttcgtaaaacatctaaacaagcatcgacctgaatttgaccaccatccatcaaaatcaaatcaggcattcttttatgctcgcgcaacagtctaccatatcttcggcggacaacttccctcgtgttgcgtacttcgtcgccaccattttgatgttcaacctcaccttttagcttatatttacgataagctgttttttcgggttcaccatctttaaaaacgactaaagcagagactgggtcagcaccttgaatatgggagtgatcaaaactttcaataaagtgtccatatggtaagcctaaagcatcaaaaatttctttttgagcgcctttagtttttcgattacctagttctaataatctaaacttatcatctagctttaacttagcattatccttcgccatgtctagcaatgactttttctgccctcgttgcggtgttctaacaggtaccttcaaaacctcagctaaagtagcattatcaaatccttcaggaatcagaatttctttgggcaaaaccctatttctttgcccataaaattgcacaataaaggaagtgaaagcatcttctggatctgtggcatctgtcaaaggaaacattctggtttctctacgcaataactttgcttgccgtaaaaagaagatttgaacagaaatccaagacttgtcaacgtaataattaaaaatatcacgctgcgtattatcattggaaataattttttgtttttcaaccgtttcttcaatatatttcaattggtcgcgaatttcggctgctcgttcaaattcaagattgctagctgcttgagccattttttcggtcaaactctgcttaacactagcaatatctccattcaaaaagctcttgatctttttaatttgctcttcgtattctttttgtggcacttttttaaagcatgcacctaagcactgccccatatgatagtaaagacaaggtctgccttgataaccatgacagcgccttagtggaaaaactttttgaataaacttcaaagtggcctgggcagcatatacattaggatagggaccaaaatagtagccaccatccttatgaacgatactagttaaccgagtttgcggatcatgttcacgcgtgatttctatgtaaggatatcccgtaccctgctttaattgaacattataataaggttgatacttttttattaatgtaatttcaagtaaaaaagcttccttatcagttgatacagtaatgatgtcataatctcgaatttcacgaactaattcagcacgacgtccaacctgtttactcttaaaatatgagcgaacccgattttttaaatttttagatttaccaacatatataaccgtaccgttaatatctttcatcaaataacagccgggtttttctggtaaaagttttagtttattctcaattaattgtgttgccattatctcatctcactgaaaaaatttgcatttaatagtttaacacagactgtttaagaagatcttaactttgcttatagaaatagctattcggtacaaaagttgatatattaaaagaaataaaatttgaggagaacttttgatgactaatctagtttttgacttaattaaccaatttggctacctagccatcagtttgctaattgcaatcgaaaacatctttccccctattccatccgaagtaattctatcgttcgctggctttgcaacccatcattctcaaatgaatgtcttcggtgtaattattgcttcaacaatcggcgcggtagttggtgcactagttttatattggattggcactttacttaatccagatcgattagaaaagttgttcgatcataagttattcaaactacttggctttaaaaagggtgatgtacaaaaggctatcagatggtttgataaatacggtaccggtgcaatcttctatggtcgctgcatccctgtagttcgtagcttaatttcaattccagctggaatagccaaagttaaattacctaatttccttatttacactagcttaggcagcttactctggaatgctattctagttggtcttggttcctatatgggtgaaaattgggaacaaattgtgttaatttttgaagaatactcattaattattggaggacttattctaattgctttaatatatttttcctgtaaatggtataagcaaaaaattaaagctgattaattcaaacgctctataaaaaatatagagcgttttcttcttttaaaaattaaaaatatcatgtaaaattaatctaatctataataagggaagtttgcgaatgaaatttaatatttttaggaaacaaaatgttgagaactatctcggtaaagacattaagttctccaaaacaatgaacgccgttgatttaatgtctcttggcgtaggagctgtcatcgggaccggtattttcatcttacccggaactgttgcagccacattaactggacctggcgttagtttatcctttgttgttgcagcaattgtttgtgctttagctggaatgtgttatgcagaatttgcttcagcgatcccagtagctggttctgcctattcatatgggaatatcgtttatggcgaatttacaggctggattatcggttgggcactgattttggaatacatgctatctgtagccactgtggcagcaggttggtcatcatacttcagttctttcattgcaccatttggtctaaaaattccacacgctatttctggtcctatgaatcttaacaatggcgtttattttgacttggtttctgttttaatcattttacttatcagtatcctgttgtcacgagggatgaagaactcaattaaaattaatgtcgtagctgtttttattaaaatcgccattattttaatttttatttttgtaggcttacagttcattaaacctaacaactatcatccgttcttgccatatcatttttcaggagtcatcaaaggagcaaccacagtcttctttgcctttcttggctttgatgttgtttcatcatcagccgccgaggttaaaaatcctaagaaaaatatgcccctaggaattattggcactttagctattgcagctgtactttattttggcgtttcaatcgttttaacgggtatggttaattataccaagctaaacgtatctaatcccgttgcttttgcattgcaatatgttcatcaaaactgggtagcagagttattatcatttggtgctatgctaggaatggctaccatgatgctgacaatgatctattcaagctctcgcttaatctatgctatggcacgtgatgggctattgcctagtgcattcagtaaattagataaaaaacataactctcctcaaaatgccttagtcgctgtcactattattattgcagcaggtgcagcattcttctccgttgatcaactagccaatttggtcaactttggtacactttttgcctttactcttgtttcctttggaattctaaaattaagaaaaagaacagatattgttaacgatggctttaaagttcccggatacccatatttgccaatcatttctggtttaatttgtatctttatgatttgccatttaagttcagaagtttacttaatggcagctatttggttaatcatcggtgctgtaatttactttatttatggctaccaccatagtcagcttgatcatgattaacatcagtaaaaattatgtaaagaaaaagacgattcgcatgaatcgtcttttttagctctgtttgaactagttaatttgattaattgcctgaccatctttaaagaaagacaaaacattattcgcagcttctttagacaaattaaatctagcaatgtgagtagctgaaccaacgtgaggcgtcatgatcacattatccatttcaaccaattcaggtcttggatgcggttcgttttcgaaaacatctaaggcggcgcctgcaattgaaccattctttaacgcagcaattaatgcatccccgtcaatcaacgatccacgagcaacattaattaaaaacgctgtgtctttcattttctttaaaaagtctgaattaaccagatgatatgtttcagctgtagcaggagtatgtaaactcacaaaatcagcttcttttgccaaagtatctaagtcaacatatttagcatctaattctgctgcaatttgatcatctacttgatgacgattatgataaataattgtcataccaaatgctttagcgaacctagcaacttgttgaccaattcgacccatacctacaattcctaaggtctttccttcaatggagtacccttggttgtcgtactcatcggcatttaaaaagacgccttcacgcaaagcatcgtcataataatgcaatctacgagctgatgccataatcattgtccaggcaagttccgccgttggacgcaacacactcttagggcaatttgaaacaactattcctttttctttagcgtattcaacatcaacgtgatcaaagccaacgccataagttgaaattatttttaaatttttcgcagcatcaatcatttctcgatcaaaagccatctttgctacgatcacaccatcatattctgcaatatgatcaagcacccactcacgatcatcttctggtcgatgtcctactggaccgatatcaacttgacaaatattttttaaatcagttaaggcctcatctcttaagccacctaaaactaaaacttttgctttattcattatttttagacctctattcaattttcatcttaaagtaaaaataccactatttgaaagagaaaacatctactttaatattttattgattgcaactgcaacaccgtcgtggtcacaatcagccgtaacttcgtcagcatgttgctttgtatattcaacagcatttcccattgcgatacctaatccagcataagttaacatcggcatgtcgtttgcttgatcgcctagggccatcacattacttcgatctatttttaagtagtcacatagtcttttcaggccagtccccttatcgacaccggcagcggttgcttcataataaaaaggctcagtctttgaaaatacaactcgatctttcatcatttcaaataaaggagattctattttatcatctaaatagtctggatcatcaacatacatacatttgatgattggtatctgcttcatttcttcttgtgtacgatatgagacttctaattttacgacccgtgaattataaattgtataatgtcccaaatcacggctagctgtataaattcgatctaacgatacgctatgaaaatgtaagtttagctttcgcgcaattgtctctaaatctacataatcttcatattttagcccctgtttgaaaataacctgccccgcggttgattctacaactgcaccattaaaactaactacatactgattttcttggccattaagccctaattcatctaaataacgttgagtacctgacaaaggccgacctgtgcaaattacgatttgcttgccttgtttttgagcagtcaaaattgcttttttaactgctggtgtaatctccttcttagaattaactaaggttccatcaatatctatcgcgattagcttaatttcttccattaccttttcccttaaaacaaagaaagcaccgcttatgcgatgctcctattaaacagccatggtctgcgtattttcttttaacttgaccaaatcagccatatcatcagcactgatttcaaaatcgatgttcaagttttcctgcatttctttaacattatcactcttcggcaaaacaatacaacctagctgtaagtcaaatgctaacattaattgagctggactaacatgatacttttcagcgtaagtcctgattcttggatcctttaacaaacgaccatgtgcaagtggagaatatgctttaatctgaattcctaaatttttacattatttcatcaaatcagttggcacatttcctatatgaacttcgatttgattaactactggcttaattgagctgttattaacaatgttagctacgtcttcttgtaaaaaatttgaaacaccaattgatctaactttaccggctttaagtgcttcttccattgctctccagttttccagattgccttcaaagtgacgatcattaattctattcacttcaatccaaggttgtggtgaatgaattaacaacatatcaatatattccaaactaaatcgatctaaagcgtcatcaattgcttttttgtaccttcatagtctttaatcgaagttggtaatttagttgttaaaaaatatcactactctcaacatcagagttccaaataccttttcccacaccactttcattgccatagtctttagcagtgtcgaaagcgcggtaaccaacattaatcgcttgacgaattacttttcgtacatcatcgttattaattagccaagttcctagttgaattcgaggaacctctactccgttattgagcattaaagttttatcagagtacatatatacacctctacattttactaatatgtctctgtttcttaattcctgtatttatatagctaataacaattattaaacaataattgtttttttcagccatctgttaatagcatacaacaaaattgttgcaaatcctatacatacattttattttttgtggttctgttatattttctaattaaaatagtagcatcaatcaatgctgctaggtttataaagattatcaaataatttattttattattctatacaaaattaatattttcgtataaaaaaagaaagggctgatgatgtcctatcaactctttctcttcagtctcttaattcccaacacctataataccagcatttatcatttaaacaaggataaaaaacatcttttacttactaaatattatttttagttttcacattatagttttcatcacatttttaaaaagtctagatgttatattacaaaatgattacaagagcaatataaatcatatagttcactattagctatatgcaaatactatattttttgagcaataagctgcaacaatttttgagcaatctttcgcttactcattttaggccatttcttagttgacttatttttttgtaaaatcgttacctggtcttcatcattgccaaaaacatttttagaaacgtcatttgctacaatcatatcggcaccttttgaagatagcttttttgcagcattttgtagcaaattattcgtttctgccgcaaagccgacaactatctgccctcgctgcttgtggctagcaacttcgcgtaaaatatctgtcgttttaactaaagttagagtcaaagtttgttgatcagcttgcttttttaatttatgatctgcaacttgtttcatgcgccaatccgctactgcagcagccataattaaaacgttactatgcttaaattcttttttgactgcaactaacatttcttcgctactagaaacatgaattaatgtaatcctaggattttgtggcaaaggcatacttacattaccatatattagctttactttcgctcccatcgctgctgcttctgtagctaaggaaatgcccattttcccactagagcggttaccaataaagcggacgggatcgattgcttcttcagtaccaccagcagtaataacaatattttttccttgcaaaacgttctgttgttcagtgaaatttttgatccacgccacaattgctcctggctctggcattcgtcctttagcagcatagccttctgccagcatccctactgcaggctccattatttctacaccatgttctttcagaaaagctatatttcgctgtgtagctggattattccacatttggtcattcatggctggtacaaccaatttaggtgcacttgtagctaaaattgtagtgctagctgcatcgtcagcaattcccgttgccattttagcaataaaatttgcagtcgctggtaaaaccagagctaactctgtccaacgcgctagatgaacatgtggtatgctagcctcattttccttgctccataaatcatccaaaacaggatactttgttaaagctgccagtgtattagtagttacaaaatgctctgcatttttagtcattactatttgaacttgatgacccgctttttctaaatcgcggataacgttaactgccttataatcagcgattccacctgtcatataaattgttattcgactcattttaccattcctcgtcatctaaacttatttttattttatcattgtccacttaaatagtagacccggatttaaaattgaagtgcaacactaagtgttaaacaaaaaggccatgaagacctaaacttgaagtgacgaaaaatcaagaaaggaagatctttatgaccaattcaaattctagcatttctaagcactatcatcaattaaccagcgtacaacgtggacaaattcaagcaatgctggattccggcataacttcccgtactgttatcgctcaagaagtcggctgccataagtcgacaatcagtcgcgaaatcaaacgcggaagtgtcctgcaaagagacagcagctatttattgtatgagcactattacgctgatactgcacagatttattatgagaagcgtcgcaaaaactgctatcagcgcaatccattgaagcattatgctgtctttttgagaatgctctccagacgctttaaagctaaatttgatgccaccagcatcgatgaattcgttggtgaattcaaaaggactatgccaggctacccttgtcccagcacaccaactgtctatcgctatattgatcagggcttgctggacataagcaatattgatctgcctatgaagctcaaaagacgcaggaacaagcgtcatcacggccatagcggtcatgctttgcacaagaagcatcttggcaattccattgaacagcgtcctaaagagattgaagacagaaaaacgccgctgcactgggaaggagatctggttaaaggcgtcagacgcaagaatcagcctgctttaatgactttgaccgaaagaaccacacgctttgaagtagttatcaagattcctgactatcgggcaagcacatgccaaaggctgcttcaaaatgagattgacagacatcctgcctggtttaaatcgatcacgtttgacaatggctctgagtttgcggatatgaccaagatcaaaggctgccagatctacttcgcccacccatattctccatgggaaagaggcaccaatgagaactgcaatggacttctgcgtcaattcttccctaaaggcaaaagcatgaaagataagtcagctgcttatgttcaacaggcaactgatgccattaaccgcaaacatcgtcgaatccttcaatatcacacagcagaagaactcttcaagcaatatatttcctcatagcctaactgttgcacttaatttgacaattcaggcttaaatagtagaatattgtgttgggagttatatttggaggaaaaattgaaaaatatgcaaaaactacttttactaactatattcttacttagcttatcggcctgcactaaaccacaatcatcctctgtaccacgtgataaaagtgccactacaatcaagattgttgataggaagcttgagttgcatcagcccactaaaaggccacttcaacctttaaatggaattttgcctcattggctgcaaatgccagataaatctcagcctaagccagcaatttatactaatttgaatactgttcttaaaaacaaatagggaaatgattagtttcatcttccctatttttgagactgtaaaatagtttgtgtaaggatgaatgattccttaaatttatttctttaaacattagaaaaaggagttcctttctcgtatgattggtttgaacaaaaaaacacatacagaaagaagaactccttcatgaatgattttaccaaagattttgctcaagctctattcaatccagacaaaataaataatttattgcgcaaagagctacaacaggctgttaataacttgttagaagctgaattgactgcctttctgggctatgatccctatgccagaaatggctggaatactggcaactctagaaatggtgcttatttccgcaaagttgatacgcaatttggcccaattgaagtgcaagtgcctcgggatcgcaacggtcaatttcatcagcacacgctgcctgactacaagcagcactcggatatcttgtaaagcatgattatcaagctttactccaagggcgtgaccaccagggaaatagccgatctaattgaaaagatgtatggcagccattacagtccagctcaggtatcaaatatttccaagcagatgattccaaaggttgaggcttatcacaagcgcaagctaagcgacaagtttttctgcatctatttggatgcaacataccttcctttgcatcgagaaacatttgagcgtgaagcagtctatattgccattggcatcaagcctaatgggcacaaggaggtcattgactactgcattgcgcctagcgagaacattgaagtctggacagatatgcttcaaaacatgaaatcccgaggcttaaagcaagttgagctttttctttctgatggtgttgttggcatgaaaacagccttgaccaggacttatcctaaagctcattttcaacgctgtttggttcatgtcatgcgcaatatctgcgctaaagtacgcgtcgacgatcgtgaaaagatcatgaacgaattcaaacaggtgcatcaacagacaaacaaagaagaagccacagctgtcctgcatgacttctataccaaatggggcaaggtttacagccatgttatcagaagcttgaaagacatagaaccagatctgctggtcttttataactatcccaagcagatcagagcttcaatttattcgactaacatgattgaatcatttaacaatgtgatcaagcgcaaagctaagcctaaggcagagtttccaactgaacagtcgcttgatgcttttattggtattcaggcaatgagctacaatgaccgttatttcaatcgaattcataaaggctttggtcaggttcaggacaccttagaatcctactttgattaaataaataattaaaaaatcaatttacgagaaagaactatttacacaaaagatttgacagtttcctattttttgttcaatttacaagttgctttaaaaatagttgttttatattaatgagtaatttaaaatttatataatacagaaaggaactttatatatgccaaatttatccagtgatttaacttcaactattaatgagagactaaacaacttgaccgcatctaaaattcgagcatttgaccaaaaggtctctgaaatttctgggattattaagttaactattggtgaacctgatttagcgacacctgatcatattaaagatgccgcaattcgtgatattcaggctaatgattcccattatgctcctcaagctggtaagccagaactacttgaagctattagcaattaccttgaccgctcaattggtgtacattatgatccaaaaagtgaaatctgtgtcactgtcggtgcaacaggtgcattaaatgatgtctttatgaccttgcttaaccccggtgacaaaattttggttcctactccggtttgggctttatactttcagctaattaaaatgactggagcaatccctattcaagtcgatactaaaaaagatgacttcatcttaacagctgaacatttacgtcatgttctcaatggtcgcggtaaaggtgcaaaggcaattattttaactgatccttctaatccaactggccgcgtttattctgccacagctctaaaagccttagcagatgtcattaaggaatacaaaatcttttctgtaactgatgaaatttatgcagaacttgtttatggcaaagccaaacatcactcactttctgaatacatccctgacagaaatattttgatttccggtttatccaaggcttatgctatgactggctggcgtttaggctatattgctgcccctaaacaaatcatgaagagcatccgcaagattaattcatttttagttacttcagttactgataacgttcaaatagctgctgtcgaagccttaaacaatggtcaaaacgatcctaaaaaagcacgtgaaatctacgaagcacgtttaaactttatgcaatctggcttagaaaagttgggctttgaaatggccacaccgcaaggagcattctacatttttgctaagatccccgaaaaatatggcaccaatgatgaacaattcgcttttgagctggctcaaaaagcaaaagtcggtgtcactcctggtcgctactttggcaagggcggtgaaggttatgtccgtctttcttatgcatcatcaactgagcaattaaaagaaagtttagctcggattagtaatttcgttaataatttataattcagataaaaaaataagtgatctcaattaaagcgagatcacttattttttattatattgatttattacttatcccaagttgaattttctgcagcatcttcagcagccatcttttcaagacgctcttcggttgcctttacactgtcttggtacttttcctcaacttcgatccccaagtcagctaattgttgatcagctactggagctggagcatgcatcattggttctgaagcagaagcattcttagggaatgctgaaacgtcacgaatattatccttatcagcaagcatcattgcaaatcgatcaagaccgatagctaaacctgcgtgaggtgggaagcccatgtccaaagcatccatcaagtaaccaaattgttcatatgcacgtttcttagtgaaaccaagtgccttaaacatattttcttgaattgagcgcttgtggatacggattgagccaccgcccatctcatcaccattcataacaatatcataactacgtgcgtgagccttatgaggttcagtagttagcaacttaaccccttcatcatctggcatagtgaatgggtggtgagctgctacccaacggccaagtccttcatcgtattcaaataatggccaatcaacaacccaaacaaagtcataaacacccttaggaacaataccagtttctttggcaaattcacgacgaaggtggtcaagtgaatcacaacataccttccacttatcagttacgaatactactaattcgccgccttcaagatcaaattccttcttcaaagcttctttgttctcatcagtcaagaagcgagcaacagggcctgaaaattcgccatcttcaaatttaacccaagccaaacctttagcgtggaaacgtttaataaagtcagccttcttgtcaatcttcttacgtgagtattcttttgcaccatttttaacagcaattcccttaacaaaaccgccatcagcaattgcaccggagaagaccttaaagtcactatccttgaaaattgggcttaagtcatgaatcaacataccgtaacgagtatctggtttgtcacagccatacttgttcattgaatcagtccaagtaattcgcttaattggagttttaagatcaatgcccttgacatctttcataattttcttcaaaagaccttcagtataactctgaatagtttcttcatcagcaaatgacatttccatatcaatttgagtaaattctggttggcggtcaccacgtaggtcttcatcacggaaacaacgagctaactggtaatacttgtcaaatcctgcacccattaaaagctgcttgaacagttgtggtgattgtggcaaagcgtagaaactacctggatagattcttgatggtactaagtagtcacgtgcaccttcaggtgatgacttacctaagattggagtttcaatatcaataaaaccattttcatcaaagaattcatgagtagcacgcaaaatctttgaacgtaaaataattgcttgttgaacttctggacggcgaagatcaagatagcgatactttaatctagtttgttctgagacttcaattccatctttaatttcaaatggagggttcttagccttgtttaaaataatgatttcagttgcatcaacttcaacttgaccagtcttcatgtcagggttaacttctgaacgcttaacaactttccccttaacttgaacaacatattcattaccaagtgaatcggcaatatccattaacttcttaccagaatctttgttaacaacgatctgaaccaagccttcacggtcacgcaaatcgatgaaaaccaagttacctaagttacgtacacgttgtacccaaccatagagatttacatcttgaccgatgtatttttcagtaatattgccacaataatctgttcttttttcgatcttttccattgttactagtccttcaattcatccattattttagtcatgttatttagatcttcaagacttaaatcgattgtcttgccatcagctaaacgtttaatattcaaaacgccgttagccagttccttttcacctaaagtaataacatacttagcaccttcacgatctgccttcttgaattggttctttaacttcttctgattgacatcaaagtcagcttcaaaaccttgattacgaaggctacgtgcaatttcaattgccttttgtgcagtaccgtcaccaatattagtaataaagaaatcaataccgcgtttctcgaataatgcaggattttgcttttcaagcactaacatcaatctttcttcgccaatcccgaaaccaacggctggagtagcgggtccattgaattcttctaccaagtgatcatatctaccaccaccaagaatagtagttgcactttcccataagctcttatcttcaaccataaattcaaagataattccagtatagtaatcaagtccacgtactagatcatcatcaattacataatcaataccaagttgacctaacatcttcaagattgcgtcaaaattagcttttgaatcgtcatccaaaaattcacgaatcttaggtgccttaggcaagaacttcttatcacgttcatctttagaatctaaaatacgcaatggattatcacgcaatcttctttgtgagtcttctgataactcatctttcaaaggagtgaaataattaaccaaagcatcatgataatcttgacgtacttgctcattccccaaagtgttaatgtgaagttggtaattcttaacgcctaactcacccaataaatcatgtcccatcatgattgtttgtacatcacttaatgggttgcttgagccaaagctctctaccccaatttggtgaaattcacgttgacgaccggcttgtggtctttcatatctaaaagttgattccatataaaaaacattaaatggcttaacaacttctggcgcatacatcttgtcttctacataagcccgcactacgcctgctgttccttctgggcgaagggcaatatggcgaccacccttatcatcgaagtcgtacatctgtttttcaacgatttctgaactatcgccacttgaacgagcaaagatttcataattttcaaaacttggtgtgcgaatctcacgataatttgcgcgattgaagaaatttctggcagtttcttcaactttttgccatgaaccagattgatcaggcaaaatatcaactgttcccttaggtttttgaactctcatttaatcatcctttttatattttgataacttgattaaaaataaaaagcgcccttgaacttaatcaagggcgcttagattagcacggtaccacctttttggttgctgcgattaacgctcgccaaacgatccattatctgttaaaggtgtcacagaccgcgatctatctactctctcaccacaacgagcagtctctttgaatagatcattgctaatccacattctttgtcatcgataattcttacttagcttatatttttctcaagacattgtcaacctttgcggtctcattttttcgctaaagatctaacacaatcgtgaatggaccatcgttttctaaactaacttgcatgtcagccccaaactcaccagtctcaacgtggaaaccgtcattttctagttcttgattaaagtcttcccaaagttctttcgatcttggtggacgcatcgcatcaacaaaactaggacggttgccttttttagtatttgccatcaacgtaaattgtgataccgacaaaatttctccgttaacatcctttaaagacaagttagtcttcccctcctcatcttcaaaaatacgcattttagctattttatcagctgcttttttgattactggcaattcatcaccatttttgatgccaactaataataaaaagcctttaccaatcttgcccacagttttaccgtcaatatctacttgagcatgatttactctctgaattacaactcgcattaattatctgacctcttagtttcgtatacgtctggaatatcacgtaatttactcaaaatttcatctagttgatctgcatcccgtacagcaactgtgacatacatatgtgcaacattatcttcgtttactttaccagagatattattaatattcttagtaagtgagttcaacttattaataacgtcactaagcagattggaacgattgtaaccaaagacttcaatatttgcattaaaggattgaacactattttcctcaacattttcccattcaacatcaattaagcggccttgttcttcagcttctttggtgatattacggcaatctgttcggtgaatagttacaccgcgacctttagttacatacccaataatcttgtcacctggaactggattacaacacttagctaaatgaagcattaagtcactaacgccttggatcatgacgccatttttatgcttaaccttcattgtagtatttgaattcttcttaggttgttcttcttgaactgcttgttgtccagaattcaaaatcttttcttccagctctttttgtttttgattttcttcctcacggcgcaaatcaaccgtcaagcgattaaccactgcttgagcagaaagatcaccaaagcctactgccgcatatagttcatctgcagtgtgataattaaagtgctctaatagcttttcaattcgatccctggccataaattctttgggtgaaagatcctcatcgcgcaacatatcagcaatcaattgttcaccatgctggatgctatcttctctatcctgacttctgaagtagcgtctaatcttgttgcgtgctcttgaagtcttcaccatgtcaacccagtcacgcgatggcgctgcattagtctgtgtcataatttcaataacatcgccattgcgtaatttatagtccaaaggaactaatttgttattaactttggcacctactgcatgactaccaacttgagtgtgaattgcataggcaaaatctagcgtaaccgaacctttaggtagttcatatacttcacctttaggcgtaaaaacataaactctgtctgaaaaaatatcacttttaacagacttcataaattcaccggcatctttagtttcatcctttaattcaaggatttctcttaccatatccagcttttcaccagaggtactttgctcaacaccagtaaaattgccacgcttataagcccagtgtgcagccacaccatattcagctactttatgcatttgttcagttctaatctgaatttctagtggacgaccgccaggcccaataatggttgtatggagtgattgatagccgttaacctttggcatagcaatgtaatccttaaaacgacctggcattggcttccattcagtatgaacagcacccaaaacagcataacaatcacgcacatttttaacaattacacgtacggccaataagtcataaatctcatcaaaatctttatgcttattaaccatctttttatagattgaataaatatgcttcggacgaccataaatttcatatttaatgcctaattcatttagagtcttcttcaaagtcttgattgtatcggcaatatatttttcacgctggcttcgcttgacatccatcaagttaacaatgcggtaataggcttcgggatttaagtagtggaaagacatatcttctagttcccacttaattgtcccaatacctagacgatcagccagcggtgcataaatatccattgtttcggaagcaatacgccgctgcttatcaggtcgtaagtgttgcagagtatgcatattgtgtaaacggtcggctaacttcaccataattacacgtagatcttgagccatggcaatcaacattttacggtgattctcagctaaaaattcttgatgagacttgtactcatatttgtttaacttggttacaccatcaacaataaaagctacatcttcaccaaatttttccttcagctcatcatttgtaactggggtatcttccactgtatcgtgcaaaaagcccgctgcaactgtatcaggatctaagcctaatgtagctaaagttccagccacttgcgttggatgaataatataaggttgtccagacgcccgtttctgtccagcatgagctttattggcaaattcatatgctttttcaacaaaggccacctggtcatcattcatatactttttgcaggtatcaattacctgatcatgcgtcatttcaatgtatttggacattatgatcatcccctctagcggtaaatatttttattcattaagccaaaagcttcaattattaagtaaattaaaccaaacattaaattatacaaagcaaaatgtggcaacattgctaagcagaaaagcacaggtaacaagaaaatccaccacttggacaggttaagtttaataaataaattgcctagatggtatgcaatgatgctgttaataataaaaaacagaattgcttctcgccacactaccggcacacggcaaatgctaaagatatacggcaaaatcattaccaaaatactccaccagacaagtgacatccagcgatgagaattcaacttcctgacaattggaattgcttcgattttatttcctagttttttcattaaaagattgtgcctctcatcaaagtttaatttaattgataatattttaccatatttatttttcttttctagtaattgctagtccaatccagcgaccttgacgcatggttaaatcgaccttaaagccattctcgtctagagccttttcaatcttaggcaattgcaggtagtcaattccagaaaagataacttgaccatcgtcgtttaaatgactatccatttgtggaatcaagtctagtaaaatttctgccaaaatattggcaacaatgatgtcaaacttgcctttaacatcagctaacaaactagtcttttgagtgtgaatattattaatatcgtttaaggctgcattttgtttggctgcagtcattgattcatctgaaatatctgtggctaaaacgtcagttgctcctaattttgatgcagcaattgccaaaataccggaccctgtaccaacgtccactacattcattggcttaaccattgctctctctaggcccatcattgctaattgagtagttttgtgatttcctgtaccaaaagctaagcctggatcaagcttaattaattgctggtccttaaaagcgggtttgtaatcttcccattcaggcacaattgccaagtgacgtgaaaaatcaatcacgtgataatacttttgccatgccgtgttccaatcttggtccttaatgtatgaagttgtaattttggcatcccctacatctaggccatagctcttcaattcctttaacttatcttggaatttttttactaatgcgtctttatctgcttcttcatcaaaataagcatagaaatatgtatccttaggtaagtctttaatgtcatccatttcaactacagtagaatcatgcaaccagcctgcttgctcaaagtcgctacgctttcttgattcaatacccaatgcattcagattatctaaagcaaaaacgctcaaagcgtcttcaacttcatgactagtatcaattttaataattagtaatttcattaatattatctcctttgggattttcttggcataatgctatcatgataacaggtgataaatatgtcaaagaagaaaaataaaaagaacaaactcgaaaaaacattggtcgaaaaaatcttagaccaaaataaaatcaagtatcgtcaagctcaatttgctgtctccgaagataaaggcggagttgcacaaatgaacacttctattttagaagacaaagagcgtttagtctataaaactctcgtctgcgaaggaaataaaactggtccattggttggtgtcgtaccagttactgaacatttaagcatgaaaaaattagctaaagtttctggtaacaaaaaatgtgaaatgcttcccttaaagaaattagccaaaacaactggttatgtacatggcgctaatactcctatcggaatttattttaaggaaaagtttcctatctatttggatgactctatgcaaggaaatcctgaaattggtgtttctagtggtgaagttggccgcagtgtctttttgaacccagaagacttagccaaattctgccatgctccttttattgatctaaaagaataaaaagcgcttacaatttattgcgttattcttcttcttttgtgttatagtaaatatatgtaccgcatacagaatataacaattacatagaagaagatgacaaaaatgaatatattgttaggaattattggctttgtagttaccatgatcgctgcctttgttgttacggcattagcaattgccaagtaaataaagcgaaaaaataataacagatttaaaatgacgtggtttgatatcatgccattttttattttctatataatagttatttattatcaaattataaatatttaatatataaggctaaactatttatactaaaaagaaagtttttgcctataaaaaagtcaaatttatatcagcaatgttatttatttgtgctaatctaatatgttgtcaaatgtaaaaagaacacattgataataaattgtaaaagactcagtcttttacgttcccaaaagaaggtttagataaattaaacacaaaaatgatttgagcttcaatacaaaatttaatggaaaacaaaaatttggttttagaaagttgtctgttggtttagctgcagttgcacttagcactacttttttcttaagtaatagtcaacttgttcatgcggatactaatactgcgactaatgaagaacaaactcaacaagattcacaaaaatctaatcaagaacagtcaaataataccatccagtcaactcaagctgatccaagtaaccaaaataatcaaagttcagctaaagattcaccaaaccaagaaaaaacaaaacaacaaacagtcgaaattaccgcttttcatacagatgaaaaaggtaacaacgcttccgaaataaaaaaagatgaatcagcttctttaatggctggtcaaggattgcttaaagagaccaaaacattctcatggaacggccaaattaaaggtagttctgacagtgaaactgaacaaactaaaactattagctacgtaattaaccatatctacgctaacggaagtcaaaaatctaacactccatttgcatctgatgaagtcatgctcaaacttaaatctgaagattcgggccaaagctggactcaatattctattgataatggcaaaacttggaacgctttagcccaagcatatactgtcacagtttctcctaataaaaacgctaatgcaaaatatgtagcagacttagttaatattgttactcctgataaaattagactcaataatcaacaccaattcattattgcttcatcaactccagacggtactcactatgaattaactattccctactacataactcaacatgcagatgtcagattttatgatgacactgataaaaccgatcaagcaatcaataaactacttaacgataatgggtttcaactctcaatgactagtgatgaagctggtcaagggcttagtgctgattaccaaaataaagacgaccaatcagctaatacccctattcaatttagcagggtagaagaagcattagctttatttaaaaataagcactataaaattgaaaaagtttctggcgccaatgccacattaaaaacggacagcagtatcggctttggcaactttgataataatgaaaatgtagatcaacacttcatcatttacttagttcatgaaacgcagatagaaaagcaaactgctacagttagggaagaagtaaaaggctactatgtaaacggtcttaagagccaaaacttttccggtataaataatccagatgtggctgttcctaaaaatgatgaaacacctactccaaatgtagtaaaagaagttatttactctagaagcagggttgttgatttagttaaggatccgcaaggcacagaaacaaactggtcacaatgaatatcaaacaatcaagcattttcagctattccgtataacaatactacaattaaagacataattgatggccattatcatttagataaaaatggcgtggttcacattgcttcttcacagaataaacgtactgctacaagcaattcaattactgggatttccgcaattgcacctaattcggagtttttagcttcaattgcttctaccacagttaatggtcaaaaaacaacaactggcaatctagcaactattagcatttgggtaccctatagttactccgcttctaaaccggaaccaaccccaactcctattcctacacctgaatctgagactccgactactccagaacaaccgaagcagccttctgagccaaataagtctgaaccacctaagtctaatgaatacaaacagacaaagattcacaaaaaagtaaattggaattctagcagtcatccttatggcactgatatgcaaagacagaagcaacacaaagatggaattattccaccccatggaactgccattaataatattccaaattcaacaacaaagactagaactactaataatatcgttaagtcttacaataatattagttctaaattaccacaaactagtcaaaataattctaacctgagcttaatcggtctagctttagcagcactaggactactgggatttactattacaaaaagaaagcatgattaattaacaatagcaaactaaaagagacagacaaaaaatccgtctcttttttctaccttaatttatttaatctgcatgtctccacttcttatcagttaagatacgtgcagctaaaagacctaatagcaaggccacgacaatcatcaacgcttctacgatccaataagctccgatattaatattcgtgattccaaagttaaatacagctcgatacatgtaaagaccaggcaccataattacaattgatggaacagtaattgcaattcttggaaaaccaacttttttccttacaatacttgctaatagaccagctgttaaagcaccaataaatgctgccaaagctggagcaacctgagcataatcgaccaagctaagacgtaatgtatttgccattgctcccattaccgcggctgtagctgccatttgtggtcgactgttaaacataattgaaaaaccaaacaccccacaaaagctagccagcaatcgcaagcaggttaaagtccctggatcaatttttaacttaggcatagatcctggatgcaaacgcaaaattgttgctacagcccagcctgccatcgttgcaattacgataattaaaatcgcataagtcagccgttcaagcccagagcgcatatctaacttagacatgtccaatccagatgtaataaatggaaaacccggaattacgaacaacatggcaccaatatagccataggcatgatcatgattaatgtggaataatatttctcctacatgaaaactcataaagtaaacactgcaggctatggcaaccgcaaccgcaatcttggctaccaaagttaacctgtgcttacccataattgctctaatatattgaccgcaagctgcacccaagaaagcacagatcacctcaggaagaccgccgcctaataagaaaataaagccgccgcaggccaagcctgaactaagtcccgaaattaacggagaatacgctgacttttgctgagaaatctcccgtaagcgtttatgaatttgaccgatagtccattccccatgtcccttttcaaattgccgaacgaatttttccatttcattcaacttagtcatattcacacctgttgctggtaacgataaagtctgggaatatgattcattatcaacatcaaaacaggtatattcaattgacactaatccaatatccgttgaacaggtaatgcccaaggttctggcaaccgtatccattgaatcacgtactcgccaagcacctgtaccacagcttaaaagcataatacctactcgacctacaatcgaggtcttttcaactaatgttgcatcctgcgccatcgtattattatcgctcttgaaaaattcctcccacagaatcttcatatgatgtttttctgataaatgatgttctcgatcaatttcactcatgctattattactttccctcacatagttcgcataattataaccattatattctaccacaggaacttcatcataatttttgatattttaaaatttgctgctcctttttattattttaaatttataatagacatataagttattttgaaataaaggatgatttaaagtggctcaattaactgatgaacaacttgctaacattgctcatgacttttaccttagtcagcttaatattgctgatatctcacaaaaatatgatttatcgcgatatttaatcgctaaagcactagaagacgcgcgtaaccgtggaattgttaaaattaaaatctcgcgtggaatcaaacgcaatcaggtactagagagagaatttcagaaaagattcagattaaaagaagcttttattgtcgaaactaccggcaaccgcgatgaaaatagtgaagccgtagttaacttcgctgctaaacaaattgaaacctatctaaagcaagcaaaaatcgctggtattagttggggtgcaacaatgcatggcgtgatcaacgacttttttgagcaggacttagagcaactttactttattcaattacttggtcaaccaattaattctaaccgcaggaagaatccattggcccaagatgcagcagaaaaattgcattcccatagtctaagtctgccaaccccactttatatactaaatccaaagatcatgcctgccttgaaacatgagccttattttaaagtaattgaaaattgttatcatcacttagacatgcttttcactggtcttagtactttccaatcatttcaagctaatcaatttttgaaagaaaattatggacctgaactatttaaagacattcctgactgcgatgtagctggaatgatcatgggacgaccatataatattaaaggtgaatttttccctgacttcgaacaacacatttgtggtatcagcatgaatgacattatgaaaacgccaattcgtttttgtgtcgtccgcaatcgctttaaatctgaggcactccttggcgccttacgtagcggtatcattactcatctagtaactaatgatgcaattgcccaacgcgttttgcaaaatatcgattaattcgctaaagtaatacagagatagactatttataatgaggagaaaaaatgaaaaaatctaaatatgatttatggattggtgcactgaacctgatcaattgtgtgttattcattagctcttggtttgccatccttggagctgacttcactgctagaatagctttaatattttacttatttgcctggttcggcgtgatccttaatgccgttgcagtagtgcaatcgcataacatgaatatctcaccaattgggccaattttaggagtaattggtaatgcactatatggctttaccgctgctctagccttacctgctgtgattgttaatattatttctgccttctttatctttatgcaacatagcaataaaaaatagaaaaagcagccaaaaattggctgctttttctatgctaaaatttgttatgtactggttaacaattactaaagttggatttacaatgactgggaggtgagcattatggagtttagaattgatgaatgtattccagatgttgtatcaatgatggctttagcacaagcaattgcaaattttgacctcaatggtaaaaagccacaagatgtgaacctaggaaggatggcaaatgtctaaagtttttcgaaatgacttaaaaataaaggacatccctaatcaaagaaaacttagggatgtctttttttagcctaaatatgaaattgctacttgtaattgtgccagcttcattgccgcctgagccacattcttgcgatcaacatcaacaaaaatttcacagtgtttttcatcaaattcataacctgaccctagcgcaatatcttccgcagtttcatataactctttatcttcctcattaggatctagcttaaatagaattcgtccgccatcactaacgcggcaatgatcatcggcttcctcaacccaaacatatacggtatcgccataagaatcaatcatcattgtggcaatctgcaatgtcctatcgtcaacccaaattgtcttggttaccttagcaacatacgaacctatttcatggttaattttctttaattcatcctgcttcattttttacctctaatttataaattcttttctttaatataaggataccctcttagcaattcttctacaaatttattaaatagattggatctcccaatcagcttgactgttaccgcttactaattataccttgtaaatatactaaattttggagaaaaatatgcatactaagggtttatcagttaaaaatgttgtagcgatcggaattggatcggcaatctatgttattttagcacgtttcacatcgattcctacgcctattcctaacacaaatattgaattagtctttccttttttggctctttttgcgtcaatctatggcgctaaggtcggttttattgtcggctttattggacatgctttgtccgatttcattatgtacgggcagacttggtggagctgggtattagctactgctgttttaggctggatcatcggtttagcggccaaacgcttagacttaaaaaatggtatttttggtattaaacaaataatcttttttaatatcattcaaattattgccaatattctcgcctggattgtagttgcaccaatcggtgacattatcatctatagcgaacctgctaacaaagtttttgtccaaggaatttcggctacgctttctaatggtattacaattatggtcattggcacgctcctacttaaagcttatgctggaaccaagattaaaaaaggcagcttgcgcaaggaggattaaacaatgcctaaaacaattattgaattcaaagatttttcatttaagtatgacagtcaggccgagccaacactaaaacagattaatctaactatcaaacaaggtgaaaaattgttaattgctggaccatcaggttcaggtaaatcgaccattggccgctgtattaacggcctaattcctaatctagatactggtgagatcaccggtgaatgcactattaacggcaataatattaaagacactaacctatttgatctttctttcaccacctcaactatcctacaagatactgacagtcaatttatcggcttaactgttggtgaagacattgcttttgctttggaaaacgactgccaaccacaaaattatatgaaacaagttgttcatcgctgggctgatgaattagggattgagcatttattaaagcaggcgccacaaaatctatctggtggtcaaaaacaaattgttgctctagctggtgtcatggttgatgaatcaccaattttactttttgacgagccacttgctaatttagccccagcttcaggaatgaaaacgatggctttaattgatcgcattcaaaaagaattaaatgctacagtaatcattattgaacaccgtctagaagaagtttggagtcagcctatagatcgcattatcctaattaatgatggtgaaattgtagctgataagaagccaaatgatctattacatgagaattgtttagaagacgttggtgttcgtagtcctctttatttaaatgccttaaaaaaagctaacgtcgaccttacgcgtattcccgacctaacttcagtcgctgctttgccccaagatcctgaaattgctaagcagttgcaagaatggcaaaacaacattaccctaagtggtgaaaaagaagagacccatcctctattagaactcaaaggcgtcggccaccgttatagtaaattgcagattcatcctttacatgacgttacagcgacaatcaatcaaggcgattttgtttcaatagttggtcaaaatggtgcgggaaaaaccaccctttgtcgaattatttgtggctttatcgacaatgagggacttattttatttgatggtgataaccttaagcagttttcaatcaaagagcgttccgataagattggttatgtcatgcaagatcctaaccagatgatttcccaaaaaatgatttttgacgaagtagctctaggcttgcgtctacgtggttatgatgagcagactattcgcactaaggtctatgatactttgaaagtttgtggtctttatccgtaccgcaactggccaatctctgctttatccttcggtcagaaaaagcgagtcacaattgctgcaattttagtgcttaatcctgagttattaattcttgatgaaccaactgcagggcaagattggcaaacttatactgagatcatgaactttttaaaacagcttaatgatcaaggcaaaacaattatgattatcactcacgatatgtacttgctgatggaatacactaacagatccctggcttttgctgatggaacactaattgctgacacagatccaatcaagttattaactgaaaaagctttaattaaaaaggctgctttgaagcgaacctccttatataatctcgctatcaaatatcaattagaaaatccagatagctttgtccgcgcctatattgatgcagaaagggatgaaaaacatgcataatgaaagccaagttttaggttatcaacctggtgattcttttatttatcaattaaacgcaaccactaagttagtttttatgctcctagtctcggttgcttgtatggtaacttatgataccagattcttaattgctatctgtattttatcaattttcttgtttaaagaggcaaaaattaagtggagtcagatttcttttatcgtgaaatttattgtagttttcatgttgctaaatctgatttttgttttcatctttcagccaagctatggtgaaaatatttatcattctaaaagcatcttgatccatgccggctacttcacattaacattgcaagaggtattctacttattcaatcttttcttaaaatatgtctgctcaattccaatcgtattgctgtttctattaactactaatcctagtcaatttgctgcttcattaaataaaatcggcattagttacaaaatttcctatgctgtttctctagctctacgctacatcccagatatccaaaattcttattgggatatctcagctgcccaacaagcacgtggcaatgaactatccaaaaaggctagtttaggcaaacgaattaaggggacattgaatatcgtgatgcctcttatcttctccagtttggatcgaatcgatacaatttcaacagccatgcaattacgccgctttggctcaaagaaaaaacggacctggtatgtcacccaatcatttaaaaaagctgattatcttgtaatgatcgcagccgtgattttggtattaattgtggttggtctctggcaacttgatcatggtagattttataatccatttatttagaccaaaattaaaaggacctaatggtccctttttggttttcgatttttctgtttatgatcatcttgagtgacaatctcaggtttcttaggaatcggcggcgtgattatttcataattatgcaaacggtgttcaagatagtcatctaatcgctcttgcgtattttcatgtacaataatcattaaatcgcctcacttttcataattatacctcaaaaatgtaggttaaacagcgtaattactaagtatgtcattccactagcaatcacaggacctgcagctacacccttgaaaaccactactccaataatagtacctaaaactaatgcaaccgtcacctgtggcaccgctgctaattgatcaacaccataacgtgacaagatagctacagcaattcccgctaaaatggcaatccatccagctggcgacttaaaagttttaatcagatccttaaagccaatctgtcctgtcgcaataggaactagaattgcaaccgaaataatagttacgccccaattaatcccctttgcttgaatagtaggcagccatttactagtaaacggtaataatttaaacaccattaccactcccgttgcaataattaatgacatgtttttacccaataacgctacaactagcaccaatgctagaaataaccaactttccatatttatctcccctcaaaaaatcattagcattagttcactttaacaaaaatattcatcaaaacaaaataatgagtctaaataagtgaaaatcaatctaatttgtgtcataataaaattactcagaaaaatatatgtatacgcgcacctcgttcttaaaacgaggtgtttttttacgcaaagaaccaatgcagatatttcacctacactggttcttcttagttgaccgatattgcgatgtgactttactactgcatcgtagttagaatttgcaaatatttatgcttgaaaataaaatatttgcacaaataattaaaaaacgtttcttgcaaaaatacaacttaacattttaataaaaacaaaaagatgccactttcgtgacacctttgtgattacttattcatacatttcgttttgaactaatccctaacttccttaatggtatcaatgatagtaccatcacgatactcaactaaggcaaccgtacgatcagtatattcaagtggctttggtacaccaacttgtttttcagccattttttgcaattcattaatatccaagatcttaagtcctggcaccttactaaaggcatccactaaatcctggcgagctggattaatggcaattcctctttcagttactaaaacatcaattgatgaacctggagtaacaatagtttctactcttggaacaacagtcgcattacgtccccgaacaagaggagctgtaataatcgtcatcttggcaccagctgcggaatcttggtgaccaccgacggctccacgaatgacaccatctgagccagtcataacattaacattgaagtcagtatcgatttgtaaagctgacaagattgaaacatccaagttgttaaccactgcacccttattatgaggatcagcataccaagaagcatcaatttcttgttgatttttattgttagccattgattgggcagcacccttatcaaagtcctgcacatccataacttttctgactagaccttcttcaagtaagtcagtggtaggtttagtaataccacccaaagcaaatgatgcagtaatgccatcatcaatcatactttgacgtaagtacctggtgacagctaatgcagcaccaccagaaccagtttggaagctaaacccttgcttgtaatatggagagttaatgattacctggttaaccatttgagcaatcttgagttccttaggatccttgggaaagcgagtggcaccagaaccaatcttgtctggatctccgactttatcaattttaaccacataatccacttgatcttgctgaattgacgcaggcgtatttggataatcaacaatattatcagttaataaaacaaccttattagcatagcgagcatccattagggcatagcccaatgagccgaagacagcatccccatcttgaccgttagcattacctgcgggatcagatactggcacacccaagaaggcaacatcaaccttaatctcgccttcttcaattgaacgagcacgattaccatgtgagcggaaaattacaggattcttcaagccgccatgtgaaacaaaatcacctagtgaaccgcgcatacccgaagaagtaatattagtgattactccctttttaatcgctccgataactttatcattcataacaccagtaagtgaacttggagccaaggttaaatcctggtaacccatactaataatcttgtccattaccaagttaaaaacataatccccatttctaaaatggtggtggaatgaaatagtcataccatctttcaggttattcttgattacctcatcaagtgaatcaataatcttattttgtccagtagtaactcttacctttggagcaacccgcttaacttcaggatgaccaatttcagtagtttcaaatggtttcaaattcatttttttcattaaatcatctggtaattcgcgttttactttattctccaatgtagttaccttctttatcaatcaagttagaagctttcgctgtttccaaaaccctggtagccttttctacaactggcttatcgatcatcttaccattaagtgaaataacgcctgagcccttagctttggcttcacgaatggcattttcaacattcttagcttgctcaatctcttctttagttggattaaagaccttattaaccatttgaatttgacgtgggttaaccaaactcttgccatcataccctagttcatggatatagttagtttcacgatagaagccttcagtatccttcatatttgagaacactgtatcaaaggcatatacgtctgcggcccgagctgcttgtaaaaccatgttacgcgcaaattccaattcgcgaccatctggataacgatgagtatgcatatctgcagtatagtcttcgccagataccgccaagcccatcattaaaggcgttgcggttgcaatttttggggcatttaagacacccttggctgattcgatggcagccatcacgccaatagaaccattttcaatgtcaaattcatcttcccaatgttcgatatcctttaccaatttttgaatcattgcagctgattcagttttaggcaagcgaataacgtcaacgccggcttttaccattgccttaacatcttcatcgtaaaatggcgtgtcttgaccattaacacgaactacaatttcactgccaccgaaatcgactgtcttaattgcctcatagaccaacattctggcagcatctttttccgttaatgaaactgagtcttccaaatcaagcataatcgaatctgcaccataaatgccagcatccttaatcatagctggattattaccaggtacaaacatcatggttctacgcaaacgattcttaacgtatgtcatttagagcacctccaaatctggcttgtctgaagtttcggttgcacgttgtgcagctgctaaagtacgagccttaattacacaatccagtgctcccttatcggttgctttaaccttggcattttctaagccataagcttttaaggtgtcagtaatcaccttttcaatctgatctccataggccttttttacttctgattcaaggtcaatctcaatgccgttagaaccctttgaaatcatgatttggatatctgaactctcaagtgttcccgcaactgctgtggttttaatttccattaatattcattcctttctcaattttagactgcaatttctgcatgttttgcttaataaattcataagtcgtttccggcacgaatttattgatctcttttaaattgccatccttgatcagctgtctaactttagtggcagtaacaatttgaccgtctttttccaagcgatcaattacgattacttcaatctcaggaccaagctcatgcgctaggctaacattataaaagtgagtcgttcttgaaattggttctttaccaatataacgacgggtaatgttcagtcctggtgcaatttgattcttaaagacagctgcgtctatcaccgtttgtacagcaattaaatcgtcaggtgattttaagaagtatgctggaaaagtagctggtgaaaccatgtagtctccgccagagattactttcacattactaaactccttagtaccttcttgcaccaatttgaagcgctcatcaaagctaaacaaagaaacatcattagccacaacaaagacataaaccaaatcgttttcttcactagccatcttaatcaaatgctgatgacccaaggtaaacggatttgcattcatgactattgcagcgaccttcttatgctcttgatctgctatttcgggcacttcagccacaaattccttcacatcaggcgttccattttctaaaaaggctgcctgatccgtcttggctaacaaattgaagtgcaagtgctcaaagctagttgcatactttgctttagtaaagacaaaggaatggaaaattccatcattagtcaaatattgcgttaaggctgtaaccactttattaaagcgagccccctgcgtatcggcatcattcttgactccgatatactttaagacattaccagccacactaccagtaccaactaaattgccttcctcatcttctagcccaatagtatgatcaatcacgttaacttcgcgttcactaaaatcatttaaccccaatgattccaacaagttttcccatttttgcctagttgtagcgtcgtttaaaaacaaatcaacgactttatccataaatatgccaccttgctatttcggtaatcgttttcacaaatatagtttactctcttagtttgattatttcaatttatctattaattttttaaatttttcaaaaattcagcaataatctcatgcgttttttctggttgctcagcctgaggcaaatgcccacattccggtacaatcgccgtttgaacatcttgattcagcatttttatcgcttgggtaaattctggattaaaaaatggcgattttcccccagcaattaccagcatgggaaccggcgtatccaaaatcatgtcacgccaatcttgctccgcatgttcaactaaacagttatagttttcggctggatcatatgggaattcttgatattcctttttagcagccaaaaacattttttcatcaatgtgatggtaaaaagccttgccaaaatcaaatttaagcatgtcaggataattatcccaagttaggtctttaaagccatacttccagctcttatccgcaatcatctttggtgactggtctaaatcaaccattgcctttagtctacctttgccataaattgacaaatatgcccaaatattggcggcccccatagaatttccaatagctactacatcatgcaaattgagcttaactaatagctcctctaagtcaactgcatgacgactaatccgctgtccacgataggttcgttcggactgtccttgattgcgtggatcaagcataataaaacgataatcatttttaaataaggcaattaaatcttgccacatttgacaagatccccctatacctgggatcccaatcaaagcaggcttatcttcatcccccgtatcggtataatgcaaaattacatcgtcattagttttaaatttcatctttaatcttctttcattttgattactcaattctattatgacgcaaaaaaagcaacctggtgattccagattgcttttttttaccataaaccaataatcttcatccaaagaactccgacagttccaaaaataatcatatagattaatccaaggacaaaattcatcttccaccattcaccttgtttaacatagccagtagtagccaaaattgtggcaggaccattagcatagtgagtggttgatgcgttgattgcaccagtaaaggctaaaagcattgcggaaaggcctaaaggagcaccagttgcaaccgcaacagacaagaatggcaaataaagagcagtcatatgtgcagttccacttgcaaagaagtagtgggtgtagaacaaaagcaaaactagaattgccaatacaaagccccagctaacaccatgaagactattttgaactaatttggagaaccaatcaataaatccgtatgaaatcagcttaccagccatgaacatcaggatagaaagccaaatcaagatattccaagcaccagtttctttcagagcatcctgcattgttaacacaccggtaatcatcaaaatagttacagccaggaaggcaacaaaagtcgcatctaattgtgggatcttaaagaaactagacaaaacccataaaacaattgaaagaatgaagactgacatcataattttttctggagttgacattggtcccatttttgctaatttttcatcagcccatttcttagcatctggagtttctttaatctcaggtgggtacatcttgtaaataacaaatggaatgattactgccaatacagcaacaggtacgattgcagtgaaaaaccaacctgcccaagacatttgatagcccttttgtgcggctaattgttgagccaccatgttaggagcagcaccggtaataaacaaagccgttgataaaatattggcatgaaaggcagtaaagtcaatgtaggcaccaatctttttacgagaagcatcatctggcttagaatcgtagccttcttttgaaacagattcaacaactggccaaacgaccccacccgtacgagctgagttcgatggaattaaggcaccgagaattaattccaatccagtaatcgcataaccaatacccaatgacttcttaccaaatttttgaatcataatataggcaatacggttacctagacctgttttactaataccatgagccataatgaaggccatagcgattaaccatgcagcagagttaccaaatgaactaagcacgccttgattaactaccataccttttgcatttgtaacgtccttcattggtgctaagccaactaaaacagttactaccaagccagctaaggttgtaccaccaattggcaaaggttttgtaatacaccctacaattgtggcaacgaaaacggcaaacatttgccatgcctgaaccgaaaggccacttgggcgccatggagtaatacaccacaatacaattccaacgatcaaaggccaaataaagcctttataattcactttttctaaagttttcataagaatcccctattctctatggacgatacacatcatcaatgatgtcaaagcctttatctgctaagcttttatctacccaacttaaatcaacttctcctttgctaaaggcaattgctttagcctcatcctgctcatgaaaagcttgtgccttaggcaaaatctcaggagcatctttacgtggaatacaaattactccatcagcatcccctaaaatcacatcacctgggttaacactaacattcccacaagcaacaggtacatttatttcaccaggtccttctttatatggtccacctggggtagtactggttgcataaatcggcagtttccaatttcttaaattatcaatatcacgaattgggccaccaattacaatacctgcaattttcttttgatcgcgtaagtaagacatcattacctcaccaatcaaagatctagtgttatcaccctcgtcgtcgatgacaatcacatcgcctggctggcaatactttaaagccgcataaattgctaagttgtcacccgccctggtgtgaaccgtaaatgctggaccaaccatttcctcatcaggattcgacattaacttaattctaggattcatagcacaatttcgttccatgcaatccgcggtattagaagctgggatctttttaaaaccagctacaacttttggatcaggcatttgcctctttaaataaattctttttcctacaggcatagagtagctctcccctctttatgctccctaatctatcttgttattgttaaacaagcctttttataaaaactaaaactcatcacaactcacaattagtattatacacttatcaatagattaagcggttacaaattttgaattattttgatttttttcttattttttgaattatttaaactcaaataattatgcaaaaaaagagaactggctaattaaaccagatctctttacttgatctttgttattttgatcttattcaccaaagttttcccaaggcattacatcgattgcaggttgatcaagcaactcttgcaattcttttggtaaaaattctttcttcacaatcacatcataaacatattgttcaaaccaagcttgactcatttcgtagaagcccttgtgaccaaacttgtcgccccatgagttttcaaccttccacttacggatatgaccgttgtcttcatcaacaccgactaaagtcatatcgtgagtagcaaagccctcaccagtattcaaacgatcagccttgctcatttgcgtatcaacgtcaaataattggtcagtcttgtacaattcagtatccaaaaagccagtttttctttccatttgctttaaaacgtcattaccaaagctgactgcttcacctgccttaagttgcgccactgcagcttgagctaaatattcaattggtacattcaaatacttaacttgatcaccaccagcaacattatcataaagtggcaaatggtaaactttgttgtattcatgattagggatgttggacaaagcaacataatcatcgaaattaaagctcttgaaatacttttggacaaaagcttgtggtgtcagatcacgttccaagtgatatttcttatcatcatcacgatattctaagtcaaatttctttggtggttcacccaaggctacagaaaccatgcgataaatctcgttcaagaattccttcttagttttttctgcttcatccttcttaccttcactgactaatttacgcaaaacaagcgcatcttttcgttccttgcgagccaagttctcagccaaagcagtagtattattggtattaaaactctctggcattgcgtatgaaggtactacaccatattttttaactaagttaatggccatggtccaaagaccaccatcttcaccagcaaattcaagccatgctttgacatgacgatcagtcaaaggtttatctgctaaacgaataattgcattgtaaaaagcgttagcacgttcaatcttgtcccagaagaaattataagcttgtgagaacgtaaaatccttgaccttgttttccttgccaaagtagtggcgcaaaacattcaaagtagtgaattcccagcaacgaccagaatgcttctgatcagttacaccgccaatatcaagttcagttgaaaagacatggttaagtcgttctgatacgcggtcattaaatgaagcttcaagcaaaccactacgacgagcagcacgagaagctactttattctcaggattagaattaaagctttcagaaaagccttcaatttcttgttgtgaaataactgtcatgatatacctcgttaattcttatcttttaattttttattaatcttttcttatataatactattttctagcttttttgtcattaagaaaaagtcctagtttttgacaactagggcttttaataaaattaatgatcaattaaaggtttatacctgacaaaacttcttgcatcttgtctgctgagttaatcatcttagcatgctcagtatcggaaagcttagtttcaattaccttttcgatcccttcaccgttaataacggttggggtacctaagtaaagatcatgcttaataccgtattcaccattaatcggagctgaaagtggcaaacaaattgcacgattgtccaaaatagctgagacaatttgagtaagcatcattgcaacaccgtagaatgtagcacctttgttggcaatgatcttgccacccttcttacgcacatcggtctcaatttctgctagaacatcatcgttgatttctgagtaatcacggagtgccttaccagcaactgttgattcatcaaagttttcaaaactagtatcaccgtgttcaccaagaaccattgagttaaccttagcaactgggacattcaaacgctttgaaagttcaacacgaagacgcattgaatcaagtgaagtaccagtaccaattacacggttcttagggaaaccagacaacttttgggtcaaagtcgtcaaaatgtcaactgggtttgcggaaacaacaaagacaccattaaatcctgattcaactactggcttaacaatactttccaaaatcttaacgttcttgttaaccaagtcaagtctagtttcacctggcttacgaggaacaccagcagtgatcacacaaacgtcagcatctttagcatcactataatcggctgcaggatgaatattggtttgacccataaatggcgtaatatcttcaaggtccattgaatcaccaacaggacgatccttagctacatcaaaaattgctaattcatcaacaattgtattttgcaataagtcatttgcaaaagttgaaccaacagcaccatcaccaacaagaaatacttttctactcataagttaaattagtcctttcaaatgtttataaactgttttttatctacatgattaattatacactaagcgctttcattagacacgatttattccataattataaattataatatcccatcaaaatctcgccagtgttattatttctatcgaaaaagagcagttaaccaaccgctctctttacataatctttcttatattatttactttcacgaacatatttagccatctgaatacctgcttgacgaccaaaaataactgtttcggcaattgagttaccaccaattcgattatttccatgaagtccgccagatacttcaccagctgcaaataatccatcaattacattaccattagtatcaagtacttgagtttcagtattaatatgaataccacccatagtatagtgaattgctggatgaacatgaattgcaaagtatggaccacgatcaagttcacgatccatcccagtcgttctgccaaattctttatccttgccagttgcaacggacttattccaagcggcaatggtcttttctaagttggcaccatttacgccaatttttttagctaaatcagccaaatcagtaccatgttctactaaaccaatctggtcataaaactcaactgcagcaaaatgagcccgcacacctgagtcaaaaatcaagtatgccccatcttcatgcaaattagtaattgcactagaaacaatctttcgtgtacttaattcattaacaaaacgttgaccattcttgttaactaagatagcaccttcaccgcgcagaccttcaccaattaaataaacatgcggattatcagtatctgcagttgggtgaacctgaatgaaattcatttgcattagttgagcatcaagtgcttcagcaagcttcagtccatcacctgtagcccctggctgattagtagtcttatagtcaactaagtctggacgatacttcttaatgatatccttggaagcaccaaagccaccagtagctaaaagaaccaccttagctttaactgttttaatgccatctggtgtctcaacttcaacaccattaacgcgcttcttagcatcttgcaacaacttggtaactttagcaccagtaaagatgtcaatacccgcttttttcacctgtgttgtcattcgtgaagttagataaaatccaactggttccattgaagcaggacggtgagcacgtttcttactcatccctcctgtaatggtcaaatcagttaaacgaataccatatttcatcaaccatgaaatagctaaagcagagtggttaacaaagtacttcaacatggcacggtcatttaataaacctccaccttttaaagtttcttcatagaagtcacggttattatcaatgatcccttcgtcaagctgaaccaaagattcagaagcgttcattccacttgaagcacgactagtgttaccaccagttttctcatttttttcaagcacaacaacatttagacctagttcatgagcttgaagtgcagcagtcagacctgctccgcctgagccaacaacgatagcatcatatttattctttaattcttttgtatttggcatttcttactttccctattcttctggagtagacttatcaacattagtcatttgcatatagtccatccattcatcatattgttcttcagtaactttaccactcttcaaagcagcttctcttaaagtagtgccttctttatcagcagtttgcgcaatcttagcagcagcatgataaccaatatgtggcgacaaggcagtaacggtcattaatgaattctcaagtaattcatccattctttcttcattaaccgttaagccatgaatcattttatcagcaaaaccagtaattgtaccagttaaaatatcacaactatctaagaatgatgcaatgatgactgtcttgaagacgttcatttcaaaattaccttgactagaagcaaaggtaatggtggtgtcattaccaaatactttagcagcagccattgtcacagcctctgcctgagttgggttaactttacctggcataatacttgaacctggctcatttgctggaatatttaattcatggtagcccgctctcggacctgaagcaagtaaacgaatatcttgcgcaatcttaaacatatcagcagccaatgttttaagggcaccatgaactacatcaagacctgaatggtgagctaagccccagaatttattagttttaacttcaaatttatgaccatagacttctgataatttaccagcaattttttcggtcattcccggtgctgcattcaagcccgtccctacagcagtcccaccaatagctaattcgtagagagttggcttcaattcacgaatatatgataagtcatgtttaagagcagaaatatagccagataattcttgaccaaaagtcaaaggcgttgcgtcttgtaagtgggttcgaccaactttaacagtcttccaatatttcttttctttaacaactaattcatcaattaagtgttgaattgctggttccaacttgtccaatgcttcaacggcaacaatattcattgcagttggataagtatcattagatgattgaccacggttaacatcatcattaggcaaaatatctaaacctgggtgcaatttattagccaagttagctacaacttcgttaacgttcatgttgctttgagtacctgaaccggtttgcaaaacatgaagtgggaagtccttacgcaagtcagtatcgcttaaagctagcaaatgatcaattgcatcttcaattgcttcgcctttttcttttggttcatcgccaacttcaacgttactttctgcagctgccttctttaagtgtaaaaatgctcgaataatttgcaatggcatcaattcaccacttgggaagttattgcggcttctttcagtttgagggccccataaagcatttttagggatcttaactggaccaatagtgtcactttcaacacggtattcttcttcgctcatattatattcctccttattaagctctataaggtttgcgttaattatcaatcaccatttataatacctgtaaaggctttctttttcaatttcattccaaaaaaagacccaggatttttcctggatcatagttttatctagactggtgattcattcttttagcaaagaagtcaccaatgatttgaacgataaaaatcaaaataattactaatacagtagctactaaagtaacatcattattgaatcggttataaccgtatgaaatagcggtattacctaaaccaccggcacctacagcaccagccattgcagtcaaaccaatcaaagaaataatcgtcaccgtcgaaacacgaatcagttctgagcgagattctcttaaataaacatcaaagataatatcacgcgcagttgagcccaaactttctgcggcttcaaccttacctgggtcaacactttctaaagcaacttgcacctgacgagcataaaatggaaatacgcctaaagttaatggtactaaggctgccttcattccgatctgtgtacctacaattttttgagtaactggtgcaacaaaggcaagcaggataatgaacggaatcgctctgaagattgaaactagcttatctgagaaattgtaccagaatttattgggccgaatcccgccatccttagttaaaactaaaatcacgccaaagataataccaagaatgccaccaaagatagctgaccaaaaagtcataaataaggtctgaaaaatactagtgccccagccagcgtctccgccccagccaagttgaacaacattgggtaaatatttacttaagaaactaatcatgatatacattccccttttcatctaaacgtgtaaatgtcacattttgcttagccaaaaattcttgtgtttgcttttgcttagctggatcgcctttcaccaataccaccaaagtaccaattggctcttcattcaaaagttcaacattcccataaagcattgaaacttctacgccaatttgcttatacaattcaataatgattgatttagtcacattagctacgctgtaaactaattgataaattgcttcatttttgccaagcttatcaagcgccaatgaattcaaagtagaaatcgcttcaagtgatccaccaacaaacttcttggttaaatcctgcttaggatgtaagaagacatctcgcaaactgccgtcttcaatcacattgccgtgttccatgacggcgaccttagtggcaatcttcttaacggcatccatttcgtgcgtgattaagatgaccgttaagtggaactttttgttcaaacgcttaagcaggtccaagatttgttgcgtattttgtgggtccaaggcactggttgcttcatcagagatcaaaatatctggattattagccaaagctctagcaatcgctactctttgttgttgcccaccagataattcagctggataaaagtcagccttatcttttaagtcaaccagatcaagcagttccaatgaccgtttttctaattcctcatcactcaacttttcatgttttaaggcaaaggctacattttctaatacagtcgtttcatttaataggttaaaaccctggaagatcattccgatgtttctgcgctttaattgcaattctttattagaaatcacctgcttgccatctttaacaaattcagtgccatcaacggtaatactaccggcagttggtttttgtaaaagattgaccgttctaactaaagttgacttaccggcaccagagaaacctacaattccataaatgtcgcctttttcaatggaaagagaaacattattcactgctttaactggttcgcccttcttctgagggaaggccacttctacattttttaattcaacaatactcatttttgatcctccttacttcaacttaacgtcccaggctgcaatttgcgtattgccatagtattccttagttagcttcttagtttctgcagtttggtaagccttgacgacatcttggtaaagcttgtccttttgttttccttgtttgacacaaagaatgttaatccattgttttgaatctttgttaattggttcaatgtaaatcgtttgcttatcagtcaagccagcaggaccagcataatcattatttactacagaagcgtcaactgaattcaatactcgactagtttgttcagcaccgatttccttaatcttgtagttatttggattgctggtgatatcagctacagtaactaaggtcttacccttcttcaacttaattaagccagcatttttcaaaacaaacagtgctcttgattcgttagtagcatcgttaggcactgcaatcgtggcaccatcaggtaagtcactcaatttatgatacttgcgtgaataaagtctgatcggtgcgatgtaggttctaccaatggcgacaacgccaccgtgatttgccttattccaatcctttaagaaggcatagtgttgaaaagcattcatgtcaatatcgcccgacttcaaggccttgttaggttggttgtaatccgtaaagttcttagtttttaaggtaataccatatttttccttagccgttttagcaattgacttccaaattgcggcttcggctttactttccccaacgattccgactgtaacagtttttgcctgattttgactgggaattcctggaccaaaactaaaccaacctgcaatcacgatcagtatcccaatgatcgtccaaataatggtatttcttcttctccgttttctcataaaatacactcctactttgataaaaataaaaaagcacccatcccaaaaggacgagtgctcgcgttaccacctttaattcgctgatcacttacgtaatcaacctcactggctatcaaaaaatagcctgcactgttaacggatgcagccccgccgatagctaaatatcaccaccggtcatcgttccaaacccatattcactagctcctatttgccaactttcaccaccacgctggctctctttatcaatagaagttctagttactcagtccttcaagatgttgttttcttgatttgttataaataagttatcatcttcttttaatctagtcaacatcttttttaatttttattagataaaagcgatttcattgtataattaggatatagttaaataatttatttttgctaaggagaaaaaatgaagaaaaatcgctttcgaagttttgctctctcattagctgcagcaattggattcatttcttttgctaatactaatgtcccatgcaacaatcaaaccgtctatgctgtttcagataaagcattggtcaatttgaaataccacaacaaagaaattgtgaccgttgatcatgatcagccgcagttttctaagagtacattgagcaagaaaaaaggtccatggcaaaaatatagccaattagattatttgaaccgagctcatgctgctaatgctttactaaataaaagattaatgccacatagtcagcgtgcggctttaacttggaatccgaccggctggcataataaacgaatcgctagtggttggttgtataatcggtgccatctaatcggctatcagttgactggtcaaaacaacaatccacgcaatttgattaccggtacgcgtgaattaaatgatccggatatgcttaaatatgaaaatgaggttgctgaatatttacgtagttcgagcaaaaactatgtccgctatcgggttactccaatatttaaagggaatgacctattagctaacggcgttgaaatggaagccgaagcaactagcaaaaacgggcctcgctttaatgtctacatttttaatgagcaacctggtatgttgcttaattacaagaccggtacttctaaggttaaacatgggtctagtactattgctgaacatgtaaaatctagaaaacgatccacttctcgagtaaccaagaaacgaaccattcaccatatcaaaggtactgtatccactgcagaacaccgagtcgttggcaatcgtcgcagtaagatctaccatgtaatgaatgggcaaaattatcatatgtcatcagctaatgcagtttacttcaacagtgaagctgccgcacaagctgctggatatcgaaaatcattaaggtagtaaaaaagtcagagcaaaactctggctttttcattatcttcttatttcacattatttttgccacgatcatatgcttccttgaattccgcaaaagtcatgttctttcctttttgatcaaagacaaccaacacttcggcgattccatccaaaattttagataaccatctaaagatagtcactgccgcacagaataagaccgccaaaataaataatgatttgttattaagcattgtcaatgagaacaatcttgggaaaaagatagttgagccaataatacagataactgataagcccataacagcaagtctaaatttgtttattggtgccgaaatatgatacatcaccataaaaccaactaagactagcaacatagtcgctgtcgtgcctacctgaccatgatcaagtgagatagaggcccctgcaatgactaaaattgcaactgccagccaatctgttaagccccctggaattgcccgagctaaaacatttggcataaactttccacgaattcgcttgtggttgctttctaaggccaataaaaacgacggcaagccaattgtaaatgcagagatcaatgtgatctgggctggctgcagcggataattgattgtcataatcaaagagaagatggccatcaagaatgaaaaaatatttttcaccaagaacaagctggctgaacgttgaatgttattaactacttgcctgccttggttcaccactaacggcattttagcaaaattagaatcgagcaaaaccacttgtgaagcttgcactgcagcactattaccagaagccatagcgattgagcaatccgcctttttcatcgctaaaatatcgttaactccgtctccagtcatggctacggtattaccttgattttgcaaagcaacgacaaactttcgcttttgatcaggcttaacccggccaaagacattatagttttgcatggcctgctcatattcaccatctttaatggtttgcgcatcgatatacttatctgccccattaattccagcttgcttagctactcgagcaacggttaccggattatccccagaaataaccttgatatcaacaccttgctggttaaaatattgaaaagttgacttggcttctttacgaattggattcgacaataaaatataaccgagaacttgtacattttcctttaaggcggaattatcttcagttaatatgccaggataattagccgcaatcaacacccggtagccttctgccgcatatttttcaaattcagtttgatattgcgcaaattgatcacgcaaaaccatttcaggcgcaccaattaaagttgtctgattgccaaaaattacaccagaatatttattaactgaggtaaaaggcaaaatgctatccgccgttttggttccatctttaaaataggcttgaatcgccttcatcgtcgcgttatcagctggcatgtttttagcaaaatccgcaatgatgctacttaaatcaccagtaaaattcttgctactaacagctttttctacggccatcttcggttcggtaattgttcccgttttatctacacaaaggacatttactcgggctaaagtttcaacactcttcatatcgtgcagcattacttcttgtcgcgctaatcgcatagcagctagagctaaggcaatcgtagtcaataaatatagcccttctggaatcatcccaattaaagcagcttccatggaagtgatactacgcttgagtccaatattattcaaaaagaaactctgactaaatagggcaattcccaccggaataatgatgatgccgacccatttaaccagacgattgattgaacgcaccatttcagattgttcaacactgcccattgcctttgctttgatcgttaatttagaaatatatgagtctttacccactttttctaagacggcataagccttaccggaaactacaaaagaacctgacattaattctgcgtctttagtcttagtgatttcatcagattcacctgtcaacaaggcttcattaacccgcagctcacctgagattacccgcgcatcagctggaatctggtcaccagtttgtaaaagaatgacatcatcttgaaccaatttttcgatgggaattttttcttcttgcccatcacgcaccgcgataatttccgtcgcattcatcacgtttaacttgcttaaaacttttttagcacgaagctcctgcacaataccgataatcgtgtttaaaacaatcactggtaaaaaagtcagatcgttccaggcaccaacaaacaccaatagcacagccaaaatagcaaaaatcaagttaaaataagtaaagacattttctcgaattatttgagtagctgttttggactggtcatcaatggcttgattaacctgtccattttgaattctttgatcaacttcagcttgagttaatcccgttatttgtttatctgtcataattttctgtcctatactgaaaatactttcatccattatagcgaaaaataaaaaagccacgcaactctgcgagactttttaacaattatttattttttctacgataagttaaaaaagtatagtcatacttgttcttttcatcatgatgatgctcttcgcgactaactaattcaaaatcatcatagttaatcgctggcatcactgtatcagttttaaaattagctttgatctctgttttttctaaaagatcaacttgatcaagtaacgccctaaagattgaaactccaccaattgcacagatttcttcagtctgatgttgacgaagatattcatttaattcagctaatgtggacacaatcttcacttgctcattacccgcatatttttgctttaattcttgacgatgagttaaaacaatatgttttctctctggtaacaagtgaggcaaactcgcaaaggtttttcgccccatgatgatcggatgacctatggtcttttccttaaaatgcttcaagtcagccggcagatgccaaggcaaatggccatcgatgccaataccatgctgctgatcttcagcccaaacaaaacttaacattgagacctcctaaactgcaaccggtgccttgatcgtgccatggtgctgataattcagcactttgatatctttcatttcaaagtcttcaatgtgctttttttcaggattaagccacaattcaggtgaatcatatggcgtccgactcagcaattcctttacttggctaaagtggttgcgataaatatgtgcatcccctaaagtatgtacaaattcacccacttttaagccggtttcacgcgcaatcatgttcaagagcagcgaatatgaagcaatattaaatggcacgcctaaaaacatatcaccacttctttgataaagctgcacgctaattttgccatcgactacataaaattgaaacatcacatggcatggtggcaaagcactagttggtatgtcttctggattccaagctgtcacaatcatgcgacgtgaatctggtgtttctttaatttgcttaattacattagcgatttgatctataaagccaccacttcttttttcccagtgacgccactgtgctccataaacatcacccaaattgccatatttttgtgcaaatgcagggtcatctaatattcgttgatcaaattttttcatttctgcttgataaacttgattaaattctggatcactttgactacgcaagccaaaatctgtcatatcagccccctgatattcagcactttcaatccaatttttaaaggcccattcatcccaaatatgattgttatgctctaacaaaaagcgaatattagtatcgccccgtaagaaccacaataattcacttttaattaaaccaaacggcactttcttagtcgttaaaagtggaaagccctgtgtcaaatcaaaacgcatttgggcaccaaaatatgatctagttccagtaccagttcgatcatccttgtcatgtccttcagtcataattttttctaacaaatccaaatatggttgttcaagaattgccattatcttcacctttcaaaaaacatttcttctaacataccatagatcttgtatgttggataatgaaaaaccatagatttagtatttcatacaaaaaataaaaaggtgaataatcaccttaattatttttcttaaattcacttttatgtctgactaagtagacaattgttgccacaatcaagactagtgccccagcgataactgaaattcttgtatcaggattgataaacataaaaatcacaatcagtattaacattgcaaaggcaaaataattcgagaatggatacaaaggcaacttgaatggatgatcttgcattgcacctttgttatgtcgtctaaatcttaattcagccagcaaaatcacaaaccacgggatcatccctggtaaaacagaggaactaaagacaatcacgaataagtcactggctgaatgattgaattgcgaagcaattacattcaaaacaaaaccaataaaaataccaccagaaatgcccataatggcccgatcgggtacaattcgcttagaaatatgcttaaaaataccaggagcttcatgatcatgtgacagtttaaacagcattctacttgaagaataaattcctgaattagctccagaaagagccgctgttaaaacaacgaagttaattattgaagcagccgcagtaatccctactttagcgaaagtcgttacaaatggtgaacctaggctgtctaatttatcccaaggataaatcgttacaatgacaaaaattgctccgacatagaaaattagaattctaaacaaaactgacttaacacttttaacgattgcctcttgtggattggctacttctccagcagaaatacctaataactcgattccttcatatgaaccaacaatgattgacattgaaaagaaaaatccttttattccaccagtaaagaaaccaccgtgagaccataaattgctaaagccagttggatgtcccccattaccaacgccaaagaaaataacaataaagcctaaaataatcattagaataattgttactactttgatcatggcaaaccaaaattctaatgaagcataggctttagcactagctaagttggccaaaagcagaaaggcaataatgatgatccccgaccacaatgctgaaatatttggccaccagtacttcaaatattcagttgccgcgactacttcggacattcctactacaatatattcaaagacattggcccacatcgctaaatagccggctaagggatgcacatattctgttgcataatcagcaaatgaacctgtaccaggattgatatagagcatctctcctagtgctcgcatcacaatgtataaaattaagccaacaaacatgtaggctaataatactgacggaccggtccacttaatagtagatgtagaccccataaacaaaccaacaccaatagcaccgccaagtgaaatcatctccatttggcctgctgtcatcgtccgtttgagctgaggagctttagattttttattcaattttcacaactccaataattaatctatcctaattaataacccgcaattaatttactggttaaatcaccattttgtcaaggttcaaattaaaaatattaatatttgggagtcttttctctaattgatcttttattcctttattaaatgaatttcacgatcaaacatttgctgcatctttttattaaaattatgggcaataaagacaattgttgccttgctttttaatagcttttgcaaaatattcatagtcgcagtctgatcaattgcactagttccttcatcaatcaaaataatgtcactgtcatgaatcttagctcttgctaagacgattttttgacgttgtcctccggaatatccaagtcaattttttcatcgacacctgctttaaactttttaatatcggccgcaaaattaacttcatcaagcacttgagctacttgattattaagttgcttgttgaacattgtaatgttttctttaattgtacccggaaataggttcggctcttgtggaatatagcctattcttgacatattaggcttaattgtcaaaccttgactattttgaaattcaattttgcctgtgctaggtttaagttcacccaaaatcaatttaaataaagtagacttacctgcgcctgaatctcctgttaataagattttctcgccaggtttaactgcaatatcaggaaaagtaagcttttcaccattaggatactgcaaagccaaatcttttgttgaaaatgctactggtgtctcttcttggccagctttaactttttcaatcacagtagcatcaccatcaacttgtttcattaaatcctgtgacgatttcataaaacttaatgcctgaattgtttgttgtaagccgatcgaaatattagctgcaaagttttggacagacataattgcaccaaaaatcactaaattcttagtgatcaaaaaagccgtcaaagacaacaggattatttgtcctaccatgttacagatcccattcaaaataattaattgctgttgagcagccgtttgtttaacatgagcctgttctactttacttgaagttttttcacctacctgaaataacttagcaccagcaaaatatcttcttaattcttctaagccagagaaccatttagctaaaacatctagataatgcttattttgctcagaaacattattagttgcttgttccattttcttttgtactaatttaggtacaaagtaagaaacaatatcaatcactacactagtcaaaaagattgaccaattaattgtaagtagagccaccaatgccgcaacaaacattgagccatagaacggcacaattggataccaatcaaaataattttttctaatcatcttaaacttcccacacgcaaaattgcttgtttcattgtgattctgcgtgttttgacaaatataaaaggcacaagtccttttcattgctataattatattgaccaaaacataatttatttgcatgaaaggcttgtgccaatgtctattttaccatctcctgaccaacaaaatgaacaactattttcaaactcaatcatcagcttcatcaagaagtttcaggtgatcaagctgttgagaaaatgtggcttccgcaaggaaaaaggcattagcctgttcagcttgtttctttacgttttaagcaatgtctttcgtgaccgcagcttatatatgcagctgaaaatggatcattttcaagaaaatttttccaagaactcatattaccgttttatgcgcaacgttcacgtcaattggctccacttcaccacacttctgtctgcgcaaatcattaataaccacttgcgatctttgacttcagaaaaacgggctgattgctttgttgtcgatgattcctacttctctaggaccggcttcaagaaaacagaattagtcgccaaagtttttgaccatgtatcaatgacttacaagaaaggttttcgcatgatgaccctgggctggactgatggagcttctttcatgccaatcaattcagtgctgctgtcttctcagaagctacagaatatgattggcgaaaataaagtttttgatcagcgcaccattgctggccaaagacgtatgcttgcccggactaaaggcacagacgtgatggttaatttaatcgaccaagctatgaaagcaggtcatcaagccaagtacgtgctgtttgacagctggttctcaaatccacatcaaatcgtccagctcaagcaaaggaagctggatgtgattgccatggttaaggttagctccaaaatcaaatatgaatttgagggagaacgcaaaaacatcaaacagatttatcgcagctgtaaaaagcgatgcggccgttctcgctacctgctgtcaatcccagtcaaagtcggacgccaggacaaagacggtgctaaaatagatgcacggattgtctgcgttagaaaccgtgccaatcgcaaggattggctggcaatcatttgtaccgacatgtcgcttagcgaagatgaaattatccgcaactacggcaagcgttgggatattgagggttttttcaaaacttgcaaaagttatctaaaactaagtacggaatatcatggcctgtcttacgatgctttgaccgctcatgttgccatagtttttactcgctacatgcttatgtcagttgccaagcgggacgatgaagatgaacgcacgctaggcgagctgttctattgcatgattgatgagctggcggacattacttttagccattccttgcaattgattactgatgcaatgctggccagcgtaaagcaagtctttcatgccagtgaagcacaaatagctgaattcacggctgactttatcaatcgtttacccaaatacatgcaaaaattgttaaagaaaactagcaaaaataatatagaagcctaaagccaagcaagatcaagagattactggcttatttagtgtgggaagtttaagtaatcatttctaaatcattagtcatccgattttgcacggccggtacttgatgattttgaccatctctaaagtaatgtgtagccaaacgagcgcgcacctttttattatattcttcttcctgcactcgaattacaaattggatataatagatcatcccttgagcagctaaatataaaatccccattaaagccgtcgcaagtaaaatcttcacccaagcacgatctttgatataagtcagccagtacatttgaatgtagcctgcaccaatagcagcgacacctgaaataactgataaaatattaatgtaaataaatcttaaataattagttttaataaagcctttgaaactcaatcagcgtcacctcgattagtcaatttaatttgtcgatcaaacattgaaactaattctgtagaataattgtgcgcaatcataattacagtacttggagtattcaataaattttgtaatacttgcttcgtcccagcactgtcaattgcactagtcccttcatcgatcaatagccaaggtgattgatgaatcaaagctctggataacacaagcttctgcctttgtcctccagataaatttcctttatccaaatcaatttgactattaagtccagcagacatcttattcaaatccttggtaaaacctacttgatctaatacacctgaaatttgattatttaaagcactattaaacatcgtgacattattggcaattgtgtcaggaaacaaggtattatcttgagcaatatagcctaattcatcaagatcaaaatttaatttttgaccattatgatcaaaaaaattgatctcaccttggctgggcgttaatttacctaaaattaatttaaataaagttgacttgccagttccactatcaccagtaagcaagattttttcaccttgcttaactgtaaaatctgggtaagataaatactcaccatttttgaattgtaaggccagatcttttacttctagccagttaatcttcttaacttgatgctgatctggagctatttttactggagcttgaagattagtaatttccttattcaaatccttggtagatttaattaaattccattccgttacaaatgctgaaacaccattcattacagttgaactaaattgaatagtagtaattaccccaccaaaaacaatttgtccttgcaaatataagtaagcacataaaaccatcaagagcatttgtcccacaatattaactacaaaggtgatcatatctgcaatagcaatagttgctccttgatgaatagctgcttttttatattcgtctgcgctttggttaactgattcactaaatatattaaaactggcatatcttcgtaattcatccaggccactcatccactgggctaaagtgtttaagaacttttcatttttcttagtaacctttattgtggccgatgaagtcattttttcaaaagttttaggcaaaaataatgaaattgcagttaaaatcaccgtcattactactaaaagccagttaaatgaaaacaaaattccaattgagaaaagcacagacaacaagtacataaaaccgtttttgattggttttaaataattctgtgttagctgatcaagattggcaaccaattcattttgcactttagcagtttgggcaatttcatttttaaaaaagtagcgactaatttttacacgaatttgatgcaaataagattgtgattgctttccgtataagtaatctgaactagtaatcaaggctaatctaactagatcacagccaatagccaaacaaataaaaataataaagccaaataaattcattttctttagctggttaaaggccggggtcatcaaatattgcgaagcagcatcaacggtcgtaccaatgataaccattagaaaaattaaaatgaatttagctttattgaccttaaaaatccctttaatactcatttgtctcatctccaagcaaattaaaatattaaaaatatcttatttatgtttaatattaccgctatttttttaatattcaatcactttttactaagtggttaaaaaaataacttgaacggcaaaattattactatatctagctaattcattaggaaaaattgggaaaaaaatagactagaaactcattatcaagcttctagcccattagtttaattcaattattaacggtaattcttcaagaaatccatcatcttttgataagctgcatcatgatctgcatcatatgcatcgactacatcgactactttattatccttagtaataatacggtactcacgtaagtctttcttttcattagcaacaactgtaatctcacccttacctggggtagagaacaattctggattaagttcttcgttcaacttatctgataattgttggttaaatgcgattgtattcatttttgtttttatctcttttctaaaaaatccaacacagacattatatcattattagataacgttgatgaatttagttttattttttatcaaggagaactgtacctgcagaaggattatgatcaattgcaccaatgatggagcagtaacaccttcaatatagcacagcaatacttattccaaaaatatcaatttgttattttgccttattacttttacgtatagatttcacttaattaaatgcacaacaagcatggcaattcctaagaagacaaaaattaaggcaacaatcatactagttactgtgccggtaactaaacctaaaatgatcatgccaataattgaataaatattcatttgttatcccttcaattaaacaataacagcagtatttacttttattatgtagcatgaacactttaaaatacaattttaacgtattttaatttgctaactttcgatataacggcaatagctgcccaataccatctaagatgaagttttccatatctgcaacttgatcttgctttctaaaagcaaattttcctaataggaaactggattgagttgcttccttattaaatgaagtctgtttttcagcatctgttaaatactcatttaaggataaatgatcagcaaactccatttcgtttttatcccataagtaccaattattagttgtccgcccttttgcccaatcaggaagatcagttaataatttattgtattgttcaggattatcgccgcgcttttcactcttataatgctgaaacataagataaacctgcagctgcttattatccagcatcacgccgatgcatggacttttatcggctaaagcattcaaacgataagctgcccagtaatgatcgcgtaagttccaaccattggtccaactttcaacatgaactttagcaaatttatcttgtggtaatttttgataaacatttaagtttatttctttccaggtctgccaaatttctttaaaatctgtttttatttgcgctaattcatcttcagaatattgcgatttcaattttttaaaagaaaattcatcccgatcaaaaattgcatacatttcttcagttaattgcgtcattttacaaagcccttaccatatttacgctagtaacaccagttggatctggaatatcatcattggtctcgccttcattataaaaaccacgtttttcataaaatttaatcaatttcggtaaacaagttaaagatatagcttgacgattttgctttctgccctcttgcgctattgcttcaattaattttgtcgctacgccttgtttacggtattcaggcaagaccgctaagctcaagaccatttgatagcgatcatctttttgattaggatgattttcaaaatataattcatcttcaatatagcgtttattaaaagcaggaccaaaaatatgaccaatcacttttccatcttcttgtgcaactaaaaaagtatcaggataattctcaattctaccaatcatatcttgttcagtttgctttttagtcatcttaaatgcgtcagattccagttctactacttcatttaaatcatccattgttacggtgcgaatgatcataataagcatcctccttaggtttatctctaaaagtgaaaaagggttcaaaagtcatctagactcttgaaccctatattattactctctatttaattcttccactttaatttaagacgatcttgctcagtctttttttgaaaatacgtcttcaccttcggtacaacttcttcgccataaattctaatggcattcatcacatcttcatgcggcattgaagcaattggcaaatgaagatagaagcgagttaacccaagttcttccatgactttgatgatcttatttgcaactgtctcgctatcaccaacaaaaattgcaccattttctccgaccgattcaagatattgttcatatgtcatccctgtccattgcggtctttccgtactaatttgatcaactaacaatttggtaggatagaagtaatccttaattgctttgtctttatcatgatttaaccagccccaagagtgtgcagcaattggcatcttcgttaaatcattgccaactttttctgcaactcttctgtacaacttaattagtggtttaaagtgcaaaggatcaccgccaattatcgcataaacgattggcaaacctaactctgcagttcggatagtcgattctatgcttccgcctgtagctacagaaatagggattggctttttagtgcgcggataaattcctttatgatcaactctaggtgtaaactttccttttggcaaatcgagaatttcttctttgttcattttgagtagcatttctagtttttcaataaaaagttcatcgtaattttctaaatcataaccgaatagatcaaatgcctcagtaaatgatccacgtcctgccatgatttcaactcttcctggtgcgattgcatccattgttgcatattgttcataaactctaattggattaattgttggtagatttgtagtagcacttgaaagatggatttgcttagttttcgaagcagcagctgctaaaatgatttccggtgctgagacagcaaaatctttgcgatggtgttcaccgattgcaaatgcatcaatattcaatttgtctgcaagaatgatttcttctaataagtctctgattctttgatcatgactaattgcttttcctgttgtttctaatggtgtagtttcaccaaatgatgagatacctaattcaatattcatttttatcaactcctaaattatttaacttactttttgtaagtaaaataatagcagataatttttgaaaaagcaatatcttgaatatgtgagtaagtgtcaatgtttttgcggtagcctttaaaccattagtctaaccttaatttcttaaatatttatatgacttaaatttctgcttagcttgcttaaataactattgccagctacctgtgcggttaatgcgccatgctggatgcctaaatgaacttcatgacgcttctttaagctgtcacgggccgctgcttttaattcctgttcagtcaatacagttatttctgaatcttcaaactcgctgctaagccaaaattccagctctcgattcttgatgcagcttaagatcctaagcatgccttctgctccagattttgaccatttcttgccttgccccttaacacggtaggtatacttgcggtggttgctctcgcagcagccaatggctttagtcacagtcagttttcgtttcttaaacggcttaatatcgtcccaatgacgatcaatataattccttaggcgccccagataatcatgattgagctcggtattcaattcatcaattagtcggctttctgcagtggttaggatagttttaactttgtcatagctgtatttgtattccaaagcagaaatcagcttgccttgcaggtcaggcgcaaaatatagcctttctttgattttcttatttaggtgaaagacatccaagaaatgctcatgacgcttgcatagccctacaatgtcatcgaagtctgttttggcatatccagcaccgccatcggcgttgctaagaattacagtatcagaaagatcataagtattggccaggtactccttggcttcgttcagcgcatcaagtcggcttaaagaaacaaattccttggcattgattcgctttctgcgtttcttgcttatattgacaatgccttcacagacctgatagcgatgaaattccaaccggcttttagtgcctttgatcaccacgccatcgccttcaagatacaaaactgggacctgcatgcggcatcatatcttgaatctgcttcttggcccgctttaatatttttcccggccatttttaccaaattgcccacctgcatatggctaatattaaagccagacaggcaattgactgctagagcagtattgcgataagtggcaacgctgcttacttctaagatgtttttgactgctaaaatactgtagcgcttgtatttgtcaaagcccattaattcatccaagggataccttgcttgtttgcctgggcagacatatcttcttctgacatacctaacttcgccaaaagccatattgattgagcgctcattcttcttatcaatctgatagccctgtgctttaaccttggtaatcatttcatcatcaactttagctaaagccaaggccatgatttccttaatcaggtttaagaagaaacagattatttttctttcacgcttaatataattatcttcagactttataatatttgcgatttcagttacaattgaattcataaaagaccagcttctaatgtgttttttgttcttaacatcagactactggtctttttgtttgagctcaagtccaaattcaaaggacttgggcttttttaattatttattcaacttaccgtaaaaaattatacacttagaatatgtgatcctttacttagttgcagttcttctaccaacatatttgataaataaagccatgattaaaataactaaacataaaagaaaaatatatgcatgctgtgttccgattctggttaaatcagctgacttagtacctttttgactagaagcaacgattgctgaagtaattgaagttccgacagcaccggcaaattgttgagcagtatttagaatagcgttgccttgagtagtttcactctcatcaatcactgccaaagtatcagtcataacatctcccaatatcattcccattcctgccatgtaaatgatataaactatcaatataaaaatattattcatctgattaggtaatactgcaaaaaacaatgtttcaagcaacatcaaacttacaccaaataaaacaggtttgcgtgcaccataattatctagcaaccgaccaccaattggacccatgattgcaccagcaactcctgctggcaaaacaatcaagcctgctaaaaaagcagtattatgattaaccaattgaatgaaatttggcaataaaaatgcattgcccaaagatattagttgaatgcagaaaaaaccaataatatgacctgtaaaactatgatttttaaataattttagatccaaaattggcattttaattcgattagatctccaaattaacagagctaaagctaataaagcaatcaaaattggaatagcagttgcacccaattgtcctgttcctaagttgctaaagccaaccagcatcccaataaagaagattgcaattatgataaagctaaggcgatcaatcttaacttttttaacagcagatttttgttcaataccccagatgcctaataacaatgaaataataatcaatggaattaaaaaccaaaagacccaacgccaattcaatgcctgtaggacgattccgccaaaggttggcccaagtgctggtgtgattccagtgatcatactgccgacacccatcatagtaccaactttacccttaggcacttgttccaaaataatattaaacattaatggtaaggcgattccagtaccaatgccttgaattactcttccgagcaatagcaccggaaaaattggtgcagtagcatcaactattaagccaagtaaaaacaaaaaattagcggttaaaaatagacttttagttttatatgaactttttaatgcagcagagattggcacgataattgaaactgcaagcaaataaattgaagtcatccattgcacaacattggttgaaacattaaaatcacgcatcaaggttggaaaagcaatattcattgaagtttcaactagaacgccagaaaatgacattaatcccgtggcaattactgctgcaaacacttttgatgatattctttcattatttggttccattttttcctccatttttgacaaattttaaaacttttagtgccgtatttatttcagcttgtgtaaaatgactacgaacttttcgatcatcttgacgcatataatcttttatcttgggaataaatgatttactcttagcagttaaagaaacatccttctgtcttttatcgaccgcattagtaacgcgtttaactaaatctcttttctccattctttgaatcatgattgtcaccgttgaacgctttaaatctagttccttttcaatttcatgttgtgaaacagtttgattttgatgattagaaataaaatctaaagttgtcatttgaacgccggtgatacccaaagtgttagcaaacgtctctcgttcacgatctatttgaacggaagattgcttaataaccttttttatcggttccatataggtcctccttttgttagatgtctaacatattttgcatttatatttgttagatatcaaacatattttttactaatttgagactttagttcaaagtaaatactagtaaatatctatttcatcatttgacgtaaaactcacatctaattctttgagactgtaaaatagtttgtgtaaggatgaatgattccttaaatttatttctttaaacattagaaaaaggagttcctttctcgtatgattggtttgaacaaaaaaacacatacagaaagaagaactccttcatgaatgattttaccaaagattttgctcaagctctattcaatccagacaaaataaatgatttattgcgcaaagaactacaacaggctgttaataacttgctagaagctgaattgactgcctttctgggctatgatccctatgccagaaatggctggaatactggcaactctagaaatggtgcttatttccgcaaagttgatacgcaatttggcccaattgaagtgcaagtgcctcgggatcgcaacggtcaatttcatcagcacacgctgcctgactacaagcagcactcggatatcttggaaagcatgattatcaagctttactccaagggcgtgaccaccagggaaatagccgatctaattgaaaagatgtatggcagccattacagtccagctcaggtatcaaatatttccaagcagatgattccaaaggttgaggcttaccacaaacgcaagctaagcgacaagtttttctgcgtctatttggatgcgacataccttcctttgcgccgagaaacgtttgagcgtgaagcagtctatattgccattggcattaaacctaatggacataaggaagtcattgactactgcattgctcctagtgagaacattgaagtctggacagagatgcttcaaaacatgaagtccagaggcttgaagcaagttgaactctttctttctgatggtgttgttggcatgaaaacagccttggccaggacttatcctaaagctcattttcaacgctgtttggttcatgtcatgcgcaatatctgcgctaaagtacgcgtcgacgatcgtgaaaagatcatgaacgaattcaaacaggtgcatcaacagacaaacaaagaagaagccacagctgtcctgcatgacttctataccaaatggggcaaggtttacagccatgttatcagaagcttgaaagacatagaaccagatctgctggtcttttataactatcccaagcagatcagagcttcaatttattcgactaacatgattgaatcatttaacaatgtgatcaagcgcaaagctaagcctaaggcagagtttccaactgaacagtcgcttgatgcttttattggtattcaggcaatgagctacaatgaccgttatttcaatcgaattcataaaggctttggtcaggttcaggacaccttagaatcctactttgattaaataaataattaaaaaatcaatttacgagaaagaactatttacacaaaagatttgacagtttcaattctttactaagaaaaggattttagttacatttgttgctaaaatagatttattatttctactcaaaataaggagttaatcataaatgaataaactaaacttcgaactactgcatatttttgatgttgttagtagatttgctagcttcagtcaagctagcaactatctctacctagaccaatctactgtcagtaaaaaaattagacagctagaagctattgtcaataagaaattatttattaggaatactaatggtattgtcctcactgctgctggacttgcttttaaaaataagtcagataaaatacttcaagatttaaaagaaataattgcgctaaagccaactataaccaccttacgagtcggggtatttgataatataagtgcctatctgatgcccgatatttttgctgaaaattttaatctatttaatgagggaaaattagatgcaatagttatcaatagcgacttctttactcaaattcaaggttctgcaattgagacgcaaattactaatgaatcttttgcaattctctttcgcaaaaataatgctctcattgcaagccaaaatagtatttcgttaaatgatttaaaaaataaaaatcgtaaatcaaaataactattataaaaaatatttattggtaatagttagctatgcataaagcgaatgaataaagattattaattagctattacgtttcttaatttggcgattttgtgttaacttgattgttatccaaataacaacgtatgaaagaataaaaataaacaatgtccaaatattgatagaccaattatttaacaacatcattattgagaataagctaaaagttccaattaacataaaaagtcttcctttccgaattcactatttaaataagtggttaaattcaaaatacaggatgctaaaatttaaaatcctaaaaattaatatctgtaagctaaatatttaagttattgaactgagtttgctatatttaagttaaaagataataaaaggaggaatttcatgaaagttacttttaaaggaaaagaagttgaattaattggcacaccacctaaggttggcgatgaaatgcctaactttacagttttagacaaaaataagcaagaagttactaaagataatttgttaggtaaaaatactttaatcagcgttgtgccagacatcaacacttccgtttgcagtattcaaactaagacttttaacaaaacaatggatcagtttcctgacgttaactttttaactatttcaactaataccatcaaagaccaacaaaattggtgtgcggctgaaggtgttaaaaatatgcaattaatgtctgatgaaaaattatcttttggtaaagctactggcttactaataccagaatctggaatactagcacgcagtgtgtggattcttgagcctaacggtaaaatcgtttatcgtgaaattgttgatgaaattactcatgagcccgattataatactgctgtaaatgaattaaaaaagttgctgtaaaatttaaaaaagattgcctcagtacatacacatatgctaaggtaatcttttttttctacccaaagtcaagtattatcaatgatttaagaaaataaatttacttgttttaatgatgcgaataaggttaaagcaaataagagtttaaatttaagaaaaagcgaaagtaccacaaataagcctatgaatacttgtagtttttccataggttgcttatacttaagttgattatttgatttcagctaaagtcttttattttcggtggctatgttgtaatcatataattgatcatgtttgataagagcaaacattgtgcgtatcagtttatggactgatgcaatggcgattttcttatagccttgtctatttgaagatcgttttttcttgtcataataatcagttatatggcaaggctgcgtagcctttaccgtctccatttgagtaataactcgataaagtatttttctggcaatatgattgccatgcttggtaatgccaagagaactgtctttttcaccagattggtaccttcctggatcaatgccaacaaacgcatcaatttgagctgaagtgctaaaccgtcttagatcaccgagctctgctactaatctcactgctgtaattctagcaacccctgggatactcaaatagatggataaagcacgagcgtttactgctttagccagcttttccatgtagttaattacatagtcgcgttcttgctggagtgaaaataaattagaaatgttcctttgaatagctctaacgataatactatctttggaatcataaggataagcttctctagcaaaagcgtataatcttgtggttaagtaccgtgccctttgttgtcctattccagaaatagaattaagcatttgagttacctgtgtctcattcttttctagaacatatccagcatgtgggaaaagactaacaagcgcccaataaattctgccagatggatgagacagtatttcttcaatttgtgggaaagtggattggaggttgcggtgcaattgatttttagtagtaactatactcctagtaagttcttcataatagcgactggcattctgaagttcatgatactctctgggctgtggatcacgcagcttttgcggggcattaaattgaattaaagccaggcgataagcatctaccttatcagttttattatggcgtaaattattgtccattagctttttcgctttaagcggattaagcttcaaatacttaatatgataatcctctaagaaagcttgcaggcttagagaataaacaccagtagcttcgaaaacaactaaaggagttatcaaatattggttcagttgctcataaagtttttgatagccaaaggaatcattagagattctaaaagattcgccttgtttgatccggtcattaaccacacaaactgtggaagatttactgctaacatcaataccgaaaataatttgtgattccataatataacctccgctgtgaagataaacctctttatcaacctattaattctaattttctaaacacggcatctaagtgcccacagacttcgaagagacttaagaataggtggtaaagcagtccgtttcttttacgacatcaagtgtctaaaaagctgaagacttgatttgctttatcttcactttctattttagacaaaataaaaagtgccagatcgtgaatccgtcgattcatgatccaacactaggttagtatgtttctttagttcttatattgttccattctttgattaagttcttccttattaaaattatctaaattaattgcttttccacccattaaccaatcaatcatttcaggatctactttatctttaggcgtatcgtaataatcttgcaaagaccatacaccaccaatgtcatcaattattccataaccttttccagaaagtatctttggacacttaggagctgcttgatcagtagtgatgttcttaatatctacttcgaattcccagctatcgccataatcataagttaataataatttatctctcttttcaaaatacgaaaccttagctttttcataatctatgcctgtagccggatcccaatctttcgcttcagcgatactttctgcattttcaaagcgttcctgcgtttttttattcagcaaatcaaacatatgtccaaaatctgcattaaacatatctagcatagcaacttctaatgttttcactgacgtattgccactaataataaatctacgccaagtagatggtttaaaagactttagttttactctaatttcataggtagctcgattgcgagtttgattttcaaaaattgtcttttttcgtgttttctgctttttatcatgactctcaagatcttttcgcaagccttctaaaattctagacaaatcctgagaagacagatctaaatcttcaagttccaaaatctttttaggatttgcttcaattgccgctatcatatcgtttatcaaatcctcatccaggccttgatcggagtatgaattaatttcttcaactacccagtcaatattcatccctatttctttactatcagttttacgaataagacctactctactcaaaaatacatagaaatttttcaaagtatttgtaatctgctctatttctagcggatgtagtttattgttagatatcataatccataaataagaaatcgcttctcctaaatcattagtaactaaatggatcttattacgtaataaataatgatttagataatccggcagcatttgatcaggttggatatatcctattcctgctggtacatatttagcatattgatcaatgagtttttgattattttctttaattttagcaacaatcttttcattgccttttactggtttattttcatatttttcaaaattagagaaatcttcaaattttggcactaagtcaacatacttatatcttcgatttggtttttgcggcttaatagggaaatacgtactaacctcatcaatcatcttagaaataaaattttgtccaatctgactatccaaggcaaaaatagtcgctgacattacagttagcttatctacgatattcttttcatcttttacaacatcaatcaaatttaaatattcgctttgattatcctctataagtttacgaattttttctagcattaaactagcttggcttttagtatcgtaaaaagacatttgcttggactttaccgctgaaactaatttttgttgctgtttaaacaaaataaagtcatagcttttaatcgcattagcaaaaacatcattaaacagtttggtatcaagtttagttaataaaattggaaaactagtgtctttttcaactaataaatagtacttttgcttttgaatatttattacatctgcatcccaaacagtaaaaggctcattcttaataatatcaatcttattttctttaatttctggtgctaagttaataccgtatcgtactggaagcatgtggttctccttattaaaataatttcattttaattttatcatgtctattcacaactattcatctcagaagcaaaaaaatgaaggcaatcactgccttcatctaaaatacacaaattttagtcttcttctaaaaccggtactgtctttttatttctaacatgatatacaactaaaccaattgctaaacctaccagtgctggcactaaccatgataagcccatgctggcaagtggcaaatgatttctaagtgaagccactgctaaaccaaatgaactttgactaaccacacttgggaaagcaactaccatatcgcctaaagctggtacaacagtaaataggattacgaaaaagtaaactacacctgccttattaaacaatggtgaacaaactgatagcaagatcaaaaccatggataaaggatataagaacattaacattggtgttgaccatgaaatgatttgatccaaaccaaagttagcggctaagaatgatgccaagcaactaagtgctaaccaaacgtggtaacttaccttaggaaaatgcttatgaaagtcttgcgcaaaagcagcaaccaaaccaactgcagtagtcaaacaggtaactgtcaataagaatgcaagtaaagcttgaccaaagacaccgccataaacgttaacgatttggttaaaggctaccccaccgttatcagaaactgcaaagcgtccgagtgacattgcacccattaagatcaataacaagtagataaaaccgatttctaaaacggccaagacacctgatttagcaacaacttttgaaacacttttagcatctttttgtcccatgccgcgaacagctgtaacaaccgtgaccccaaaggctaagcctgctaaggcatccattgtgttataaccttctaagaagccatttactaatgctccatgcttataagctgcagttactgctgcagtttgtggattacccaacggacgagcaaaagctacaagaaacactaggaataataatgctaagaataatgggtttaataccttaccaacgttagacaagatattattttgatgataagaaaaagcaaaagcagctaaaaagaataaagctgaaaaaacaagtaaagcggaactttgcatattcttcggcataaatggtgcaataccaactgtgaaagaaacggttgcagttcttggggtaccaaacaatggtccgattgtggcatggattaaaaccataaatactactgcaaatccggcacccagcggcttaccgatgtcgtatactccgtctgcatgagtaattgctactgctaatacagagaataatggtaataaaacccctgtgatcaaaaagccaactgcagctgttccccaatttgctccagctagttgtcctaaatgtaatggaaagattaggttaccagccccaaaaaataatccaaacagcaaggaagcaacaacgagataatttttccatgtaagttttttcgatgtatgatctgtcattttctctcctccaaaacatccctgataaacaaaaaaggccctcagctgcaaattgtaactgagggacgctttgagcgtggtaccaccctttatttatatcactattgctagcaatacctttcacgtacagtcaactacttgacgatacgtaggcactataatgggtgctcccactacttcttactttaagttaagaaatagaactcgaaagtgattttcatttaaacttaggatttatctcctcacacctaacgagactcgctgtaaattaagtctaaattactcttctttctctttgttttcagatttattaaatttgttaataactattttaatcaaaatataatcgttgtcaacaacttttttatttattttcccggatttaaaattgaagtgcaacactaagtgttaaacaaaaaggccatgaagacctaaacttgaagtgacgaaaaatcaagaaaggaagatcttcatgaccaattcaaattctagcatttctaagcactatcatcaattaaccagcgtacaacgtggacaaattcaagcaatgctggattccggcataacttcccgtactgttatcgctcaagaagttggctgccataagtcgacaatcagtcgcgaaatcaaacgcggaagcgtcctgcaaagagacagcagctatttattgtatgagcactattacgctgatactgcacagatttattatgagaagcgtcgcaaaaactgctatcagcgcaatccattgaagcattatgctgtctttttgagaatgctctccagacgctttaaagctaaatttgatgccaccagcatcgatgagttcgttggtgaattcaaaaggactatgccaggctacccttgtcccagcacaccaaccgtctatcgctatattgatcagggcttgctggacataagcaatattgatctgcctatgaagctcaaaagacgcaggaacaagcgtcatcacagccatggcggtcacgctttgcacaagaagcatcttggcaattccattgaacagcgtcctaaggaggttgaagacagaaaagctccgctgcactgggaaggagatctggttaaaggcgtcagacgcaagaatcagcctgctttaatgactttgactgaaagaaccacacgctttgaagtagttatcaagattcctgactatcgggcaagcacatgccaaaggctgcttcaaaaggagattgacagacatcctgcctggtttaaatcaatcacgtttgacaatggctctgagtttgcggatatgaccaagatcaagggctgccagatttactttgctcacccatattctccatgggaaaggggcaccaatgagaactgcaatggtcttttgcgtcaattcttccctaagggcaagagcatgaaagacaagtcaaaagcttatgttcaacaggcaactgatgccattaaccacaaatatcgccgaatcctccaatatcacacagcagaggaactcttcaagcaatatatctcttcataacctaactgttgcacttaatttgacaattcaggttctaaactatttttaattttatacttttcgttttgacatcaattggtttcgaatgtatctgcgaaatgcttcatcaccaagtttttgacgcttttcatataattctttggtaatcttaccagtaacataacacatccgatcacgatccttatcagtgacagccttaaagatatcttgagccacttcctcaggcgattctaaactatctgtgtctggcattaacatttttgtttgattttttagtaactgatcaaatcccggcattgcgaatgtctccatcttaaaaccggttttcacaacccctggaacaatgattttcacctgaatgccaaatggcgctaactcatgataaagcatttcacatactccagtcaccgcccacttatctgctgcataaataccatctagagctaatcccatttctccagcaagggaagtagtagtcaaaattaacccacttttcttttttttgaaatatgggataaatttttgggtgacacggatcattcccagcaggttcgtgtttaaggactgctgcatggcttcttcggtcatgtcctcaaagcgagacttcatcccataaccagcattattgaacaaaacatccacctcatgctttttaagaacttccgagactgtctgagaaatttgttcaggcttcgttacatcaagtggataaataaaaacattttgataggatgttaattcggtctctttttcaggtgaacgcatagtagcaatcaccgttcaccctttttctgcaaataattttgctgttgctttgccaattccggatgacgaaccaacgataaaaattgtactcatattcactacactccttatcttaagatggacgattaaattattcactgacgataattaatgacttgattgcttcacgtttatccatcacttcatatgcctgttgaattttgtcaagactaaaacgcttagtaaagacttttcctggatgaattttaccttttaatacagcatcaagaagaatcgcacgatcataagtagtgacggaagcaattcctccgcgaagaccaatgttcttccagaaaagcgtgtttgatgatggttcggtttgtggaacacctactcgaccaacaattgcgcctggacgagctaacttgccagcttgttcaatagcagatacggccccaacacattcaagaaccttcttaactgcatcatcaccacgtaatttagcaccgattacaccacaaaggccaacagcaccatccccgataactgcgaccgtatcgtcttccttggcttcagcacttgcagccgcatggtaaccagttgccatcacatcagctaaagttaaaagatcgtttaattgctcgtccgtgtaatctgaggggtgacctggaatctttactaatgcccagttagcattagtaaaacgaagatattcaccttggtaaccaccattactgccagcttcttggttaacacagttgccatcgaaaccagctaaacaagctacgcagtgaccacaaccatgagtaaatggtgcaattacaaaatcaccaggcttaatatctttaacgttatcgccaacttcttcaacaattgcaattgcttcgtgtccaactaatgatcctttttcacgattagtaatcccacgataccaccataagtcggacccacatacacaagcacgaacaatctttaaaatcgcatctgttggcttttggattattggcttttcaacctcatgaacttccatcttaccagattccataaatacagctgctttcatctaaattcgctcctctaattatttttacattgtattaactcaaactgtaaaccttaaagtccactacaaggcaagtaaaaatttaactcggcttattaatgccaatactttcgcaggaataaagctcatcatcgttaagtaattttgtaaccaaatcaacgattgattttattgaaacatcgggaccaccaaatggttcgcccttatgagtaatttcataattaactggaccaccagtaaaccagccgggacgaataacggtatagtttaaattagacgcttccacgatgtcagcagcgtcccgatatgattgaagaattgggttgctttccaaattactactaataccaattgaagcaggaatctcattataaattcccatcgaactaataaatatcaatcgtgatatgttattacggtccatcgccgcaataatctgcttagcataggcaactaagtcaccgcttaatgctgcaaacaccgcatcctgtcctaccaacgctttgtctaaatcgtgatcatttaatacatccccactgattacagtttctcgttgaggatcaataacattaattcgattggctgaccgcgcaaataatgttaagtgattgtccgtttcatttaatactgtttgagtggttgtagtccccaatgctcctgttgctccaataattaaaatattcttcataacatttgacctcctttaataagtgctggcgatctgcttagtgatcgcccatttaccgttaatcttcgcaaattccatcttcatttgaagcaacaatgtacttactgggcttccccaaacgctagctttaactttattgtgaccaattaagctagcgtgattcccagcaatctgaatgtctgagatctgctcctcatcagaagaataatacttaagctcaccattttggatttgatcgatccattctagtttgggctgagcatacccagtcatgtggtgtaataccatggttgaatctaaaatctgacccaaggtttcaatgtctttatctacgattgcccgattttcctggcggtaaaggtcaataattacctctttatctgtcatcaaatcgtcctttgctaataactgttccatcaaagccttatcaaaaccagtttttctctttttgctttgattaattgtctatatcataacgatcttcaataactaaaccaattcacatttacaattaataatcataagtaaaacttatcaagctaaattcttatatacacaaaaacgccaaaaattagtgaagaagcttctttttgacgtttatttttacctcatagtctatttcttaaaattgtttctttaatagctcagcaaacttttcaatgtaaaagcctgaattatcttgtttccaatatgtatagtaattttgttgaaggggaatatcaccggcataaagcggaattgtcttaacagtttctttattaatcatcgcttgagttcgtttattaacaataaagtacccctgattggctgctaccattatttgagcctcatcgatagtagtaaccgttaaaaaccggctttttattcctaaagcatcccgataatattgttcctcagccgctttttgtgtttcattaacaattaaaatgcatgataagtcagctaattgcgttgctaaaatacggttattatctggatagttcaatggtaaaactaccataaaatcagtttcagttaagaattcattgtggtattcgtttgataaagcacgccgctgatcggagaaagccagatcaattctatcatgttttaataactcaaataactgttcatgagttccgcttttgattttaacctcgacttctggatacatttgcgaaaaatgggcaacagtatgcaaaaattcgttagtaccaaaattcgataaatagcctaaacgtaattcataattgattggtaatttaccaattttttgtgtctgatcaattaattcattagttgttttaacaacttctttggcgtgttggtagaagaattcaccagctgccgtcagttcaaaacttcttccctttcggtcaaacaatttaacatcaagcatattttcaagctccttgatttgctgggaaatggctgactgggaaatattattttcttcggcggcgcgggtaaaattatgtcgatcaaccaccgcaataaaatacttcatctgttgaaacatttacttatcctctcaatttgatttggaattactaaacaaagcaacgatgctcaatatactttgccccttcacgaattgacaacggtgccaactcttgctgattttactcaataaaatcacgaaccatgatttcgcatatattttttatttgtctagcacattcagggttagcattgtgagcaaaccgttctttcaattgtctataatcaagcatctattcggctccacagcttttttactactatcttatcagatgtttattctcatcaagcatttcttttttctttaattcataatattcttcttcatctaaaaatgacatcacatggttttcaaagtggtcaaacttgtaggctagataattccaagttcattccgttttgcaagtaggataaagcctgtttaacgagaaccaattactaatattgaaaatatttaattttttgcttgactataaatgaatgatcgtttattatacaaatatgcgatacaaagatgaacacaaaaaagaagctatttatgaagcaacaattctacttctaaataaagaaggtttttcatcaacatcaatgtcgaaaattgctaaacatgccggtgtttcagcttcaacaatttatatttattttaagaataaagatgatatgttgaaaaaattgtatttagatactaagaaaaaaatgagcgccaaaatgtttactgatacaacaaatgatgatgctaagtctagcctagctaaggttattcgtaactatattgattttattttagataatcaggatgcttttctctttttgcaacaattcactaactcgccttatatgactgaattagatgagcgcgaagcaagcacctattttactccaatgtatcaattagttaaaaaaggccaagaggagggaacttttaaagatgtagacgctaatttattatttgcctacattgagccaccaattaccgaattagctaagcgtcatttcaaaggagaaatagattttactgaagaaagaattgatgtattaattaacttagcttggagtgctattaaaaagtagcactttaatttttattattacagtgaacgatcattcgtttattataataaaatcaagtgtttacttaatcgtaaccaaaataagcaacagtaaatgaacggagactacaactatgcaaaagaaagtaacttttaaaaacaacgaacacgacatgtctggtatcttattctttccagataattttgatgaaaacaagcaataccctgctttctcaatcgcatctcccgctggtgcagttaaggaacaaattgcaactaattatgactcacggttagcaaagtatggctttattgccctagcatttgatacttcacatcaaggtgaaagcggtggcaaccctcgtcaattagaagctccttatgaacgtgtggaagacataaaatgcgctatcgattatttaacaactttgccatacattgacaataatcgtttaggtcagttaggtatttgtgctggcggtggctactcaatgcatacagctatgaccgaccgaagaattaaagctgttgtagctgtaagtatgagcgatccagcatcatggattcgtgacggttttgacggaaaaacctcagttgaaactcaattagccttacttgaagaagcttctaatcaaagaactcgtgaagctaatggtgctgagccaatttatggaactttcgttccagaagaagtaactgaagggatgcctaatactttagtagaagctcatgaatattatcgtaccccacgtgttcaacatcctcgttcaactaacaaggtatcaatgatgtcaattgataaaatgactgacttctccactttcttgtttgctgatcgctactcaactcaaccaattttgatgattgcgggtagcaacgctgacactttccgtttctcagaagatctgctcaaaaaagcagcttcaactaacaaagaactattcactattgaaggtgctactcacggtgatctatatgataaacccgaatacgttgatcaagcagttgaaaaagctgccgctttcttcaaaaaaaatctttaaacatattaatgtgaagcgacttaaaatgaataaacaaatagtctacttttcaaacagtggcaataatgagcgtttagctaaaagaattgctcattattatggggttaatgcaacacctattattccagttaatccgtatcctaataaatatcatgagttaacttcacaggcaaaaatagaacgttttcggcacattaatgttgctattaaaccagttaaacttgaatcaaatatcaatactctaatcttagtatcaccaatttggtatgcagatttgccacgccccgtggtcacttttctgaaacaggttcagagatcttttcaacatgttgtttttgtcagtgacaagttcatgataggttttggtatttgcaagcgaacattaaaaaaatatttatcaaagcaaacaactattgatttaatagcagccaacagtaataacttttcattagttaaacaatactttcaaaaataaaaaaaactcttaaagattgacgtgtagagttctgtcttctttaagaggctttttttgtgtttgcttcacgataaatactttgaataaggctttctagtaaatcattgccaaatatacaactatccaattatttttttacctgaattgtcaaattaagtgcaacagttaggctatgaggaaatatattgcttgaagagttcttctgctgtgtgatattggaggattcggcgatatttgtggttaatggcatcagttgcctgttgaacataagcttttgacttgtctttcatgctcttgcccttagggaagaattgacgcaaaagaccattgcagttctcattggtgcccctttcccatggagaatatgggtgagcaaagtaaatctggcagcccttgatcttggtcatatccgcaaactcagagccattgtcaaacgtgattgatttaaaccaggcaggatgtctgtcaatctccttttgaagcagcctttggcatgtgcttgcccgatagtcaggaatcttgataactacttcaaagcgtgtggttctttcagtcaaagtcattaaagcaggctgattcttgcgtctgacgcctttaaccagatctccttcccagtgcagcggagcttttctgtcttcaatctctttaggacgctgttcaatggaattgccaagatgcttcttgtgcaaagcgtgaccgccatggctgtgatgacgcttgttcctgcgtcttttgagcttcataggcagatcaatattgcttatgtccagcaagccctgatcaatatagcgatagacagttggtgtgctgggacaagggtagcctggcatagtccttttgaattcaccaacgaactcatcgatgctggtggcatcaaatttagctttaaagcgtctggagagcattctcaaaaagacagcataatgcttcaatggattgcgctgatagcagtttttgcgacgcttctcataataaatctgtgcagtatcagcgtaatagtgctcatacaataaatagctgctgtctctttgcaggacacttccgcgtttgatttcgcgactgattgtcgacttatggcagccgacttcttgagcgataacagtacgggaagttatgccggaatccagcattgcttgaatttgtccacgttgtacgctggttaattgatgatagtgcttagaaatgctagaatttgaattggtcataaagatcttcctttcttgatttttcgtcacttcaagtttaggtcttcatggcctttttgtttaacacttagtgttgcacttcaattttaaatccgggaattatttttttagttaaatttgatgtaatatcagacaataaagaaatttttcctactccacgcatcccgtaaataatcgatatttgataacatcttcaaatgattcaactacattttcgactactttgtttctccctaaatatatttggggaactttaccaaagttagtatcaaatagatttttggcttctatagtttttcctccattttaaatttcttcagattttttgattttattttagatctaattacataataaaaagtaagctattacacttgctaaaatgaaatctaaactatttattacattgcttctcctattatgaaatgcttttaatgtctaattttgcttttttccatatcccagcaggtccaagccagcaataaaataatcagtacaataatagcataagcgaaaatcttggcatcttgtttaggcattatattaaatgaaacaaaggttgccggcaaattatataagttcaagaaaattaaaataatcgagctgatccagcctaagaccgaccagcttctcctatttttgaattgccccatcattcttttatcatcagtcataattaataatggaacaatcgaaaatgggacagcaaaagctaagaagacttgtgaattttctaaaagcatgttgagagcaaagtgctgctgagaaattgtgtcgttagctgtcataacaacgcaaatgataactggaattacggataatagccgagtaaataatcgtctcgcccaaagtggcatcttcaagtgaatgaagccttccattacaatctgaccagttaaagtccctgtaatagtagaattttgtcctgaagcaagaagtgctatggcaaagagaactgataaaattccagttttagctactgaaatcaaaattggattacttagcattgcagtattgcttaaagcatcataaagtccaaaagatgaactatctttaaccgctccacttttaaaaacagctgctcccataattagcaaaagcacgttaacaaagaatgctagaataagttgaatatttgaatcccaagtagtaaaacgaactgcatttttgacatcatctggatcatgatgatttatctttcttgtttggcaaattgaagaatgcaaataaaagttatgcggcatcacagtggcaccaataatacctaaactacctgttaacggggaaagcccattaaccacgggatgttgtgcaactagttcgggactcggaaaaacagacaagaagatcttactccaattgggctctgctaacatgacttgataggcaaaaacaaataaaatcaccataatcaaacatgaaatcaaagcctctatttttctgaaaccaacctttgacaataataatagtagaaacacatcaaaaatagtgataaatgttgctataactagtggaattttaaataaaaggtttaaggcaatagctgcaccaataacttccgccacatctgttgccataattgctaattcaattacaatccaaagaataaagctcaatctcttactagttctagcacgaattgcctgcgctaaatccatttgcgtaacaattcctaatttagccgacatatattgcaacagcatggccattaaactggaaattaaaatagtagaaatcagtaaaaagttaaagctctgtccaccattgattgaagcagcccaattgcctgggtccatataacctacagcaactaatgcgccaggtcccgtataagcaaaaagcattctaaagaaattcttagttttaggaaccgcaatcgtactattaatctcagctagcgatttaccattagcatatgaaataaaactatgattttccatcaatggtgctcctatccatggattcctagtgtcattcgagcaatacgcgacatcatatttggattccattgcggataccagaccagtttaatttgacaatcatcgatttccgcaacgctctctgctgccttggtaatttcgttattcagccattcactcaaaggacatcccataatagttagtgtcatcgtaatctggcaaagatgatcatttacctcaatgccataaatcaagcctaagtcaacaatatcaacttgcaattctggatcaattacatcttttaatgcctggtaaacatctttttcttgatcagataaattttctatttctaacattaaccaattgctccttccatttggaagctgatcaatcgattaagctcaacagcgtattccattggcagctgcttggtgaacggttcaacaaatcccataataatcatttcagtggcttttctttctgaaataccgcgactttccaaataatacaattgatcttcagaaattttagaaactgttgcctcatgttccatcgccacatttgagttttcaatcgcattagttgggatggtatctgaagatgattgatcatccataataatcgtgtcacattcaacatgcgccttagaaccgtccgactttttagaaaacttaacacttcctcgataatcagttgagccaccgcctttggcaattgacttagaaacaattgagctagaagtgttaggggcattatgaaacatccctgctccagaatcttgatgaatcccgtggtgtgccactgcaatcgaaagcatggtaccacgtgctccttcaccatttagataaacgctcggatatttcatggtcaccttggcacctaaatttccgtcaacccattccatcgtagcatgcttgccagcaacggctcttttagtttccaaactataaacattatcagaccagttttggatagttgtataacggcaatatgcattgtccaacacatttacttcaaccacagccgcatgaagagagtcagatgaatattgtggtgcagtacatccctcaacataatcaaggtgtgcatcttgatcaacgataatcaaagttctttcgaattgaccagaattttccgcatttaatctaaagtaagcttgaacaggtgcagggacttgaactcccttaggtacataaataaaagtgccacctgaccaaacagcacagtttaaggcagaaaacttatttaaatcaattggaactaatttgccaaaatatttttttaataaatctggatattcctgcaatgcagtatcagtatctgtaaagataatccctaatttatcaaattgctctttcatcttgtgataaaccatctcagattcatactgggcagctgaaccagctaaatattttctttctgcttgtggtacacctaagcgttcaaaagtatccttaatatcctgtggtacatcattccaatcacgatattttttatcagtcattttttgataataaagcatatcatctaagtctaaacccgaaagatcaggaccaaaactaggcattggcattttttcataaatatggaaggcctttaatcgataatctaacatccacttgggctcatgcttttcagccgaaatttgtctaattacatcttctgttaaaccatgtcccgttgaaaattttggttttacattatcatgaaagccgaattgataatcttcatctttaactatttcttctgctttagtcattatcctcatcctcgttttctttaccaagtaatgctcgatctaatccccaccaagccaaggtggcacatttaatccgcgccgggaattccataatacttatcaagacttgagcgtcttctagtttttgcatgtcttgttcactacgttttttgccagctgctaagtctgaaaatatcctagaaaaactaatagcctgttcaatattttttccttttaccaattgggtcatcatactagctgaagccttactaatagtgcatccttccccatcaaaagcaatatctttaatttgatcattctcaaccaaaatagttaagtgaatcttatcaccacaagttggattataaacagtcgtttcattagtataattagcaagttgtccaaaattgcgtggagtttgagcatgatcgagaataactgctttatacaaactttttaatttatctaagctcaccgaaaaactcctttgcttcttgaattgaactaaccaattgatcaatatcattttttgtattatagattgagaaactagcacgtacagttgattctgtcttaaggctttccatcaatggttgtgcgcaatgatgccctgctctaacttctacaccatttaaatcaagtgctgttgctaaatcatgtggatgaatttttcttaaattaaaagaaatcacaccagtacgattactgcagtcttttggaccatacaccactaagtcatctatttttgataattcttttaaagcatatgctgttaaactatcctcatgtttttgaattaaagttaaatctaactttcctaaataatctattgcggcacctacgccgatcacgccagaaatattcggagttcctgcttcaaacttttgaggcacaggtgcccaggtagctccttttctagttacatttgtaatcatttcaccaccaaaacgataaggcggcatttgttctaacagagcttttttgccataaagcacacctactccagttggcgcaaacattttatgtcctgaaaatgcataaaagtcagcatctaaatcagtcacattaaccggaaagtgtccgacggcttgagcgccatctactacaacaatcgcgccatttttatgagctaagcttgttaaagccgcaataggattaattgtccccaaaacattgcttacatgagtaatcgctacaattttagtttttgtagtaattttactttttgcatcttccagatctaaacgaccattagcatcaatttcaataaactttaacttagcgttctttcttaaagcaatctgctgccaaggcaaaaaattgctatgatgttccataattgaaacaacaatttcatccccagcttggatattttgctcaccataagttgccgcaactaagttcaaactatctgtgcaaccactagtaaatacaatttcacttgcatttttggcaccaataaagtcagctactttttgacgggcattttcatatttttgtgtagcccttagccctaaagtatgaacaccgcggtgaacattagcgcgatcaaaattagtaaaatgttcaatctgtttttctacaactaacggcatttgactagttgctgcattatcaagatagatcaatttttcatcattaattttttgattaagaattggaaaatctgctttaattttcttaacgtctagtttgtccatcaattaattttttttccaaaatatcaatcatcttttgccgaacttccttattaggaattgcatcaagaacagcccctaagaacccgcgaattaccaatctttgagcttgatcatatggaataccacgactcattaaataattcatttgaatttgatcaacaggacccacactagccgcatgagcagcaataacatcattttcatcaattaaaagcagtgggttggcatctccatgtgcattatcagacatcattaaaactctattttgttgatcagccttagagccatgtgcaccatgaacaatctgaccaattccattaaaaattagttgagaattttcaagtaaaacaccacgttgatttatcaaaccagttgaatgtggcccgcggttggttactcggttgttaataccgactctttgatcaccagttgtaactgcaattgccttagaatccgcataactgccttcgccaattaattctgaatccaaatcgcctaaggtgttgcagtcattcataaaagcaattgcccattcaacatgtgcatcattttcaattcttgcacggcgattaaagtaaagcgttgtatccttatccatttcatcaagggatgaaaattcaacatgactacctggatgtgcaacgatttccaccattaagtttgcggatttaactgctttatcctcattttgaatttcttccaagaatttcacttgactgttatcctccgtaacaatcaataaatgtgaaatatatggatcttgcgtagggttcaaagtaactgtaattggttcggctaaaactgtatttttaggaatataaagaaataagcctgaatttaaatacgcataatgataagccgttaatttatcttcatcatttttaataacggaagctaatgcggatttaactaaatctggatattgctttattgctgtaaaaagatcgcataagatgattcccttatcgttaagaagatcatgattctctttttttataaaaaagtcaggttggttttgccacttaaaatcttctttagcaatcaacggccaatcttgataggaaaaacgctgcattttgggataagaaagtttatgcatcttttcaaaagaactagtccttaaatcagttaaccaggaaggctcgttgttttcctttgatgagacaagtatgttttctttgctcaacatttgacgttttcccccctaattttcatcaactaacttaatatgtaacccaagttcatcgcgaagacctgcatatccttctttttcaagttttttagctaaatctggtccaccgtctttaacaatacgtccatccatcatgacatgaaccacgtcaggcacaatataatcaagcaaacgctggtagtgtgtaatcattaaagcaccaaagttgtcaccgcgcatggcattaactccccgtgatacaactcttaaggcatcaatatctagacctgagtcgatttcatcaagaatgccaaaacttggtttaatcattaacatctgcaaaatttcgttacgtttcttttcaccgccagaaaagccctcattcagataacgctcggtcatggcttccttcatatctagcaaatccagatttttatctaattcattcaaaaaagtcatcactgaaatcggatcatcttttggtcggcgagcattaattgctacccgcaaaaattcagcattagtcacgccaggaacttctgctggatactgcatagctaaaaataatccttttctagcgcgttcatcaactggcatgttaataatgctttcaccgtttagcaaaatatcgccttgcgttatgtgatagcgaggattccccatgatagtctcagataaagttgattttcctgttccattaggtcccataattgcatgaatttcacctgtcttgagagttaggttcacgcctttaagaatctttttactcgtttttttatctttgtcttcaacttctacatgtaaatccttgatctctaaagttgccatttaaatcctctttttctacatttggtattgctgcttaactatcagatacaacatatagataatataacgcaaaaaaaattttattttcagtcttgacttttaacctaacatgtttgcgtagtcatgaactggcacttgaagtgttaaatcagaaattggaaatgtaacacaagtgttgacatagttgtattcactatcggctgcacgacgtccaggaaatggaataaatacttttccattaactactcttgaacgacatgcaccacaaacgcctgagcgacatgatgaaggggcaataatacctgctctttccattgccaccagcaaactttcatcacttcttgctggaataacttgtatttgatcacgggttttaactgtcatgttgaaagtcttattctttgcttcctcaggataattcttgaaaaagtatggatttactgaaccggacatttcttgtcttacttgccctggacgaagatctaactttttaatttcttgatttacaaaatgaatcatcgcagctggaccactcatataaatagaataattcttatctgctggagcatatttttcaatgatggcctgattgataaagccatgttcatatccttctacttcttcatcacttaatatgttaacgaccttgaccttatcagttttggcagcaattctatctaattcatcacccaacaaaatatggttgtgcgttctacttccatataaaataatcaaatttgcatcaattgtgccatcagcaattgcaccagccattgagtaaaatggtgtaataccgctgccaccagcaataatggtcttcttgtctcttaatggttcatagaataattgaccagcaggacccgaagcagctacttcagtgccaaccttccaattctcccaaatataaggagttacatacccatttttgactaacttaattgtgagcatatattcgccagaaagcgcctgcttaggtgtgcttgaaatggcataagcacgtgtacaataacttttaccaatatgaagttttaaagaaatatattgacctgcttggaaatatgcaagtttgctggtaccttttgattcatctggtacaaatacaaagctcttagcatcgtcacggtcaataatcttagtgattttcaaatattgcgtttcaggatgaagctcctcttcaagaatgttcatcggatattttttaggcaactctgcatccgaagcattttgaatttcatgttttcgctcattttgaagcttctttaaatcaataattcccttaatctcttcaaatttattcatgatctgctcccatattattaatatcactaacagctatttttgctgcagttaaaccagtagtgtatgaaacattgtaaccatcacacataaatccatgaccaccgcagaaatataaatgtggcagtggatttacaacgttctttaaatccattgatctaccaataatttgatcccatggtgcacaatgatagccataaatttcaccatcaggtgttcccatatagcgagcaaatgttggtggtgcagcaattgcaatctcttctatagaatcactaattttaatacctgttgcctgttcatactcatcaatagcatttttagctattttaactttaagtttttcataatcttttggtttaacattatcccaaacaccatcatcaactaatttagtaatgtagcaaacactaattcctttaggagaagcatttggaatgacagtatttaagcaattcatgatcataaaatcatttttatccatagttttacaattttcatattgttttctagtatcacctgttgaagcaatgaacacactatagtcatttattccaagttctcgacaggatttatttagcccaagatacaccaaaaaggcactggttcctaatttatgtgagtttgcatattttaaagcatactcaggaatacacttttgatccatcatgttgccataaactgcgtgaggagtaattccacaaataacttccttagcaaaaactttttcacctttaatttgcacaccaacagcttgaccattttcaactaagattttttctacagttgtactcagccaaacatcaccaccattatcataaattacttgtgccaatgctgttgacatatcatgacttcttctttgaggaatataggcatcgttttctacataagtagctaacatagtggcaaaatacggaaattcaaattcatcagtgggaatatcaatgtaacaccaatatgctccaagaatttgttgagcttttttaggaagttttaatttgttaagcacatcatcccaactcttagtagcatactcgataaaagctggatatttttttataacttcttttttatcctttccatctgctatttctgctaacgcattcatactttgctcacacagatcaaaaagcttttccatcttttctgaagtacctggtacatatttttccatcgcattaataaaattttctctaccagctggcatcttaacatcaaatccgtctttaccataaataatatagcgataagtatctggtaattcttgcatttttacgttggcacctaaccagtcatacatttttcgtactgcacgcggattatcagcatgaccatattcacataattcatgcaaggctacttcaaactcaaatctgccgcgaataaaactggttgctgctccaccagccagattatgtctttcaatcaatagagtttttttgcccattctagcagaacttgcggcggccattaagccgccattgccagccccaactacgataacatcatatttttcagccattttttaaccctttcgttttcaaatgattacgttttcattataattaatatgaattaaaaaaaggatcaaagtaaagaaaaacaaagttattttatataaactagccgttggcttctggtcctaccagtgcaaaggagaataatatgaaatttcacccaataaatgtacccactgcaacagatttattcttcgttaatcaattaaaaacagcaatcttaacaggaaagtttaacctcggcgataaattacccagtgaaagagttttacaagaacaacttcaagtaagtcgaactgtgatcaattccggattaaaaaaattagcggcattacattttatagaaattcgtcctagatatggggcttttgtagcagattatcgtgtcgatggcgatttgcaaacaatgaacgaaattattaatttctacgggggacattaccgaatttcacttttaaattcgatttttgaaatcaggaaactaattgaaaatgatgttgttcgcttagattgtatagaacaggatgaacaatgcctgcaatcagctatttcaaatatgcaaaatcttgccaaagccaccaattccaaggacgctgcacaagaaatatttgcttatgtacatagtttagccttggcctccaagaattatgtttatcctttgcttatcaataactttaaatcaatctatttaactttaggtgaatggatctgtaatgaagtcgatgttaattctatttctgaagagaatctaaaattaattaaattaatcaaatcaggagataaaaatatagcaattgcttataataacaaactgattaattggagttacgagattttaactaagcaataaaaaaacggtcgatttgcttttcgaccatttttacgcacgttttgcgcgcgattatttatttaaaacatattttgtagatctaccctcaccaattctctcaacataaccttgctttgttagttgtttaagtagatttaaaacttttgttttaccaaaattacttgctcgactaatttgtgtagaagtatttgcaccctcgcgaatggttctaaatactttcttttcatcatcgcttaaatcatcagtaataaattttagaattggtaaaattatttttattgaattttcaaagatctcgaactgtggttgaactaaacttccttgataggaatctttaattctctttattcctgtaccaaattgttcaattaaacccaatctaaaaaagacattagccacaataggatttcttaaaatagaaatttgacctgacagatactcatctttactcaagttatgaggtaatcctcctggagaaactacttctattcgattatcaaacatagaaactttaatttgagcattaatattccaagtcctatgaaccaaggcattagctattgcttcacgaaaagcttcttcaggaatttgacttataacgttacgagtaacaccatgtatttcctcacgctgataatactgccgatatttttgaatagtttggtcatactctttaagaattgattcattctcatagtttgccctatccagcataatattaatattttcaccaaagcgaacgacatcaatcccacgataatgatttttatctgctaataattcacccgcattagtatatccggcattcttctgttctagattaagagtaattagcacatcggatgtcaatttattaattcctagtttttcttttagtgccatttctaaaatattaaacgatagattttgatttgcagctgttaaactgtcataagtcttattttcgccaatcaaaattagttgtgataattctgttctatccacttcaattgaagcactatcatttcttttataagcttttgctttatataaatatggtggattatcgccctgttttaccgtcaacgtgactacattagttttatcatcaatctctaaattataatctggatgtggctggatggaatcatttattttattctctacatttaaacaaaaatcaattggattttttacaccaataattgttccatcatcctttataccaaatttaacttctcctgtaccataatttgcatacgcactaaccgtttttaaaaatgtgtttgtaagattctctttaaattctaaattctttgtttctctcacttaagtcaccttgccaatctattttatctacaattatactctttcgcacacaaaaaaacggtcgattttattttcgaccgtttttacgcacgctttgcgcgattatttatttttcgttcacgataatcaatgacttaattgcttcacgattgctcattgcttcgtatgcttcttggatatgatctaaatcaaaactcttagtaaatacttttcctgggttaatttttccatcaagaacagcttgtaaaagaacttctttatcaggcttagttactgaagcaataccaccgcgaagaccgacatttttccagaataattggtttgacttaggctctgcatgtggtacacctactctaccgattaccgcacctggacgagcaatttgaccagcttgttcaattgcactttcagcacctacacactctaagaatgcatcagcaccagcattttccttagttaaagccagtacatctttaactgcttgatcatcacgacttgaaacaatgtcagttgcaccaaattcttttcctaattgtgcacgatcatcgtggtgggataaaagaatgattttttcagcgcccaacaacttagcaccaataacaccggcaagaccaacggcaccatcaccgataactgcaacagtatcgcccttcttaacttcagcgtttaatgctgcgtggtaaccagttgccataacatctgacaatgtttgaagggatgccaattgatcatcagtataatctcctggcttaccgggaatcttaactaatccagagtttgctggttcatatttcataaattcggcttgatagccaccgttagtacccggcttcaaattcaagcaattgccttcaaaaccattaatacatgcaacacaatgaccatatccatgagtaaatggtacgagaacaaaatcatttggtttaatattagttacctcatcactaacttcttcaacgacaccaattgcctcatggccaattaaagacccactttcacgatcaacaattcctctaaaccaccataagtctgaaccacaaacacttgcacgtataacacgaataattgcttgattttcaccatcgatttttggctttggaacttctcttacttcaactttacctggttctacaaaaactgctgctttcatattatttctccttactatcgtttactttatatacatagtctaatcaaaacagactgtctataaaattactaatattaaatgctactattcaaaaaacgtatagtaatttcatttatgaaaaagaaccgcttgcttaaaacaaacggttctaactattagttacttattaatcttcatcagtattttggtgctcttgactgtcatttttttctttttcataatccttgtcatgatctttttcatcatcttcagtctcagtctttataatcttctgatttttagcatcaatttcaacttcggttttcttacctccatcttcaaattctactttccagattggctgatcatcatccatttctaatgaccattcaacaggttgacctgatacctgagtttgagccaattgagtagcttgctctcgagtcatcatattattaagatctaatgcttgcgcctcatcatctgaatctaatttttcagattcagcttttaaaatattgccattacttgcatcaatcttaactttgtattcattttgtgaatcaaaaccttcaatttcatacacatatgaattcttcttttgctctagttcaatctccttaattgattttgagccatacttttcataaaacttattaactgcatcttcttgagaaagattaatacttgcagtacctgtattactttgattttgttctgtgttattgctttgactctgttgcgtttgagtgccagtagaagcattagcctggttaatcgccaataaacttgcgccacccgctgctaagcctaatgcagctgctgccaatgatacttttttaatgttaaactttttcataattgaattcctcgcttttcgtattaattaactttgtacacttagtttacgaaaaaaggaacctttaaaaaccaagatttaatgtagatcaaatgaaattttcttcattttagagttttttctaattaaattgatttttcaataaatatcctatacgcgtggtgctagttaaatcgttctagacaatatgccatattataagctaaaatagctatttctagccgctgttgaaagcctactggacttcttgctcgattattctcagcgttgtaataactaagcaaagaaaagtcgctttcaatgcttcttctaattgccatcaattgatgatcattatgccttctagctccttgcatatttttacgatatggcgtccaaagcacatatcccatgtgctttagattagtagctagatttttgcttaaataaccttcatctcctaaaagataatggttggctggatgagcattgatcatcaattctactgtctctttggcatcatgtactgacgctttagtaactgcatagtcaagcagatagccatcatcgcttactattgcgtggaccttgaagccataataatagactttcttggttgctttataaccaatatcagctacgccccgaaagatcttgacacgataattgcgaacaggctggcaaactggcactgggaaactatcaataatcaaaaattctccagctgtctttacttcttgattccaagcctgacggatacaacgaattagaggcaagagcattcgagctcgacggttaaaacgagaatgagataagccaacgaagaatttacagaatcttcgttgagattcaattccaatttcagtttgccaaatgagcatcgctaagatagaactattaggaagcttggtctgatcaacatttttacgatgtttaagtccatcaggcgcataaagcttatacagcgagcgacaaatcacatttaaccgattaaaactaacttgtaaatggtgagaaaaacgcttaagcttgagatagttcaattagatcagactcttttctatttaaattacttacaacttgagtctagtctaattggacttttttattaactaaaacgatttaactagcaccacgcgtatcctataaatttgtctcttttttgacttgttctagagcctttacctgtgcttgatctaagggacgatactcattcatcttattaagtaattcagttaatttgttggtattcattttatcactctcgtgttcattagttgcttttgttaattcattttattatagaaccctcaataatcactaaaaggaatttcaaaaagatttagcgtattttatcacctttggaatttttctaattaaaaaagttattgacaaatttagaaagcggttttattctaagaatgaattaaataatgttcttcgaggcagggtgaaattcccgaccggcggtaaagtccgcaacccgcataagcggttgaatcctttaatggtaccgatagttacagtctagatggaagaagaataattttgctgtgctcttttctattttgatagtaggaactgtacttaaattattttttgaatgttagttagaacctcgaggtaattcttcgaggttctttttttgttctgttaggaagtgaaagaaatggaaaacagtgatgaagcatatatgcaattagctatccaagaagcgaaaaaaggactctatcaaacatggaagaaccccatggttggagctgtcatcgttaaagatggcaatatcttggctacaggtcatcatattcgttatggttattatcatgctgagcgtgatgctatttcaaaactaactccagaacaattatttaattcaaccctatacgttactctagaaccatgcagtcattatggtaagcagccaccctgctctgatttaattgtctctagcaaaattaaacgagtggtaattgcgcaagtagatccacatcaactagtaacgggtaaaggtattgccaagttaaggcaacacaatattcaagtaacggttggcgtattagaagatcaagcaaagaagctaaacaagttttatacttacttctaccaacataatcatccatggataacgttgaaacaggcggtcagcttagattatcgaattaatgaggctaaaaatattcgcactcaaataacaaatgaaactgtttatcagcgagtacatagagagcgcgcaaattatcaagccatcatgattggatcaaatactgccattatcgataatcctagtttactgactactgtcactacggattttccacccattcgaataatagtagatcgacgtggtagattactgaatcatttaaatattaagttattaacggataagttaagtccaacttggatttttactcaaaatacaagcttagctaagactccacataatgaaaatatctcaatttttttgatgaaaaacgcttcaatcaccgaagtcataaaaaaactgaccaatgaagagatccagtcggtttatgttgaaggtggtcctaccctagctaatgccttgctagccgaaggtcaagtaaacaatttaattacttacataagtccaattttacttggtcaaaaaggaaagctaggaatttcacccagctccaaaacaactttacataatttacgtgctgaaaagttggatgataattttagaattgaaggtgaaattaatgtttagtggtctagtacgcggcgacgcacgaattgctgctattgataaaaacgatgaaactattgttatgactgttgcttgccagcccgactttactaaaaacttgcaaattggcgattcaattgcagttaatggaacctgtttaactgttgagcaatacactgatacttcttttgtagtaacgatgatgccacaaacttatcagaaaactacttttaagaatttggatatcaatgcccaattaaatgttgaacgttcactacaggtcggacaaagattagaaggtcatctagttactggacatattgatgatattgccaaagttacggaaatcaggactaacgaaaatgctattgaagtttggtttgcctttcctactcgcttaaaaaatcagattgtagcacaaggtagtattgcaattaatggcgtatcgctaacagtaatggatacacatgataatgttttctcagttggattaattcctcatacacaagatgaaacaaatttaagtaagttaaatgtcggctcagaagtaaatattgagactgatatcttaagtaaatatgtcgctaaaaatttagaaaagagaatttaaaatggacgtaaaaaaaattcaaaatgcaattcaatggatgaaaaatggtggtttagtgattgttgctgatgatgaagatcgtgaatctgaaggtgatatgatcggcttagggtctaaagttactcctgaaaatgttaactttatgaccaaacatgctcgtggcttactttgcacccctgtaagcaaaacaattgcccaacgtttaaatttctaccaaatggaacaaaataatactgatccatatggtacagcttttacaatcagtgttgattacaaaaccaccactactggtatttctgcttatgatcgtgcggcaactatcaaggcaattgctgatcctacttccaagccagaagacttctttagaccaggtcactgttttccattagtcgctaaaggtgatcaaatcaagaatcgtaatggtcacacagaagcttctattgccttagctcatcttgctggcgaaccagaagttgcatatatttgtgaagttatgaaagctgatggccatatggctcgtcgtccccaactgaaagaaattgctaaagaatatcacttaccatttttaacaattgcagaactacaagaatatattaatagtcctgtgagtaaacgctcagagtttgtaaattttcccactaaatatggcaatttcaaaattaaggctttcgccaatgaaaacttagctattattaaaggaaagattgatcctaaaaagccagttttagtacgtcttcattcagaatgccttactggtgatacgtttggctcaatgcgctgcgattgcggtgatcaattacatactgccatgaagcaaatgaataaaaatggtagtggcataattctttatttacgacaagaaggacgtggaattggattaattaacaaattaaaagcttatggtttacaggaccaaggttatgacacttatgaagcaaatgaaattttaggttttaagccagatgaacgaaattatattattgctgccaagattttaaaagatctaggtattagtcatatcaatttgcttactaataatcctgataaaattgatcaactagaaaataacggtattactattgaaaaaagaattcccttggaaattcctgctaataaggtaaatcatgactatttagaaactaaacgagataaattccatcatttattagaagcactatagtgaggaacacagaaatgaatatttatgaaggaaattttaaaaacaataattatcacgttgcaattgtagcatccaagtttaacgaaaccgttacccatcatttagttgacggtgctattgctactttaaagcaatttggagtacttgaagatcagatcgatatctattgggtcccaggtgcttttgaaattggttttactgctaataagcttctcaattcaaataactacgatggtattatgactttaggcgctgtcattaaaggtgagactgatcattacagcatgattattcagaatgttacaaacgcaattatgcagatgaatcttaaagcagaagtcccaataacttttggtattttaaccactgagaatattgatcaagccttgcaacgatccggcttaaaagctggcaatgaaggttcctctactgctcagagtctattagaaatgatttcgctaaataaacaaataaagtaatagagtagagggagattaattctcgcccctctcattgcaccggacgtacggttccgtatccggcgctacgtttgtaatcatctacgagataaatagtattctagcggatcgaccaagcctgggcgatccgctttgcttatgcccaatacttttgggctaagcaaaaagttaacaacatgtccggtactgcgtttataccaacctaatcgcgtattagctactttatgaatatcttcgtcgctaaaattgcactttaatgccttgttaatccgcattaaattagtgtatattcttcttggcagtttccattgtttaatgattactacccgtatcttatggcgcagccattgactgaatttaaatagaaagtatttcataccgccaattttaaagtagttaatccaacctctgaccacttgatttaccttagtaaagactaacgatagaggttgagcagctgctttcctgcgacaaagaagctctctaatcttgttataaagcttggacaggattggcgaaagcggtccgccttgaggcacgccaatcttattgggcttaaccaaaccatcttccatgataccggattttaagaatgaccgaatcaaatggagggtggttttgtcatttactcgttctctaattattgaaattaatttatcatgattgaccgtgtcaaaatatttctcaatatctaaatcaattacccattgatatccatcatcttcatgattgcgtatttaatttctgcttgatgctttctgaaatagctatcaagttcttcaaccattcttttatctactcccggagcacctttattaatcttgactctatgaatcgcttctttaagattgctctgacttagaatctgttcaattaatttcatctcgtaatatctccatttctacttgtaaatttattcagaatcatcccaattgctttcaccatcaaagagttacgttctctttgtgctaggctatcctcttattcggactatctgaacattgcttatagcgggatatgctcttacaaacattaggtccttcgctccagtctcattacaagactttcaacactactatgacctcagctgacttcttgcgactaacctttttcgaccaggcttacgatcgctgatgttaaagcttgctcagcttgcctgtccgcaagatctctcggggtaagacattcatctttgattttccactgcctcctggtttaccgtcttgactttacgtttgtcttttggacttcgacttgtatcgcagccttatccgccatttggcctaaccaggtttctgtacgtaggctcggaaaactcgctagccacttccttcacccatagcgtcaccgctatcggcttgtggttcactacacttggcgacaaatacccgtggtccaaactttcattggattagatgaaatgtcatgcccgacacacaagtaaaaagccaccgaagcactaatacgcttggtgactcaaaggtctaattataagtttcttctactagtagctcatatggctttagcaagtaggtagctcccgtttctttgataggataattttgcacaacaacttttttgcgggaaatatgataattaacttaaacttcccacacgcaaaattgcttgtttcattgtgattctgcgtgttttgacaaatataaaaggcacaagtccttttcattgctataattatattgaccaaaacataatttatttgcatgaaaggcttgtgccaatgtctattttaccatctcctgaccaacaaaatgaacaactattttcaaactcaatcatcagcttcatcaagaagtttcaggtgatcaagctgttgagaaaatgtggcttccgcaaggaaaaaggcattagcctgttcagcttgtttctttacgttttaagcaatgtctttcgtgaccgcagcttatatatgcagctgaaaatggatcattttcaagaaaatttttccaagaactcatattaccgttttatgcgcaacgttcacgtcaattggctccacttcaccacacttctgtctgcgcaaatcattaataaccacttgcgatctttgacttcagaaaaacgggctgattgctttgttgtcgatgattcctacttctctaggaccggcttcaagaaaacagaattagtcgccaaagtttttgaccatgtatcaatgacttacaagaaaggttttcgcatgatgaccctgggctggactgatggagcttctttcatgccaatcaattcagtgctgctgtcttctcagaagctacagaatatgattggcgaaaataaagtttttgatcagcgcaccattgctggccaaagacgtatgcttgcccggactaaaggcacagacgtgatggttaatttaatcgaccaagctatgaaagcaggtcatcaagccaagtacgtgctgtttgacagctggttctcaaatccacatcaaatcgtccagctcaagcaaaggaagctggatgtgattgccatggttaaggttagctccaaaatcaaatatgaatttgagggagaacgcaaaaacatcaaacagatttatcgcagctgtaaaaagcgatgcggccgttctcgctacctgctgtcaatcccagtcaaagtcggacgccaggacaaagacggtgctaaaatagatgcacggattgtctgcgttagaaaccgtgccaatcgcaaggattggctggcaatcatttgtaccgacatgtcgcttagcgaagatgaaattatccgcaactacggcaagcgttgggatattgagggttttttcaaaacttgcaaaagttatctaaaactaagtacggaatatcatggcctgtcttacgatgctttgaccgctcatgttgccatagtttttactcgctacatgcttatgtcagttgccaagcgggacgatgaagatgaacgcacgctaggcgagctgttctattgcatgattgatgagctggcggacattacttttagccattccttgcaattgattactgatgcaatgctggccagcgtaaagcaagtctttcatgccagtgaagcacaaatagctgaattcacggctgactttatcaatcgtttacccaaatacatgcaaaaattgttaaagaaaactagcaaaaataatatagaagcctaaagccaagcaagatcaagagattactggcttatttagtgtgggaagtttaagtaattaattcttcctgaattgtcaaattaagtgcaacagttaggttatgaagagatatattgcttgaagagttcttctgctgtctgatattggaggattcggcgatatttgtggttaatggcattggttgcctgttgaacataagcttttgacttgtctttcatgtgcttgcccgatagtcaggaatcttgataactacttcaaagcgtgtggttctttcagttaaagtcattaaagcaggctgattcttgtgcaaagcgtgaccgccatggctgtgatgacgcttgttcctgcgtcttttgagcttcataggcagatcatgtccaccaagccctgatcaatataacgatagacagtagacgtgctaggacaaggatagcctggcatagtccttttgaattcaccaacgaattcatcaatgctggtggcatcaaatttagctttgaagcgtcttgagaacattcttaaaaagacagcataatgcttcaatgaattgcgctgatagcagtttttgcgacgcttctcataataaatctgtgcagtatcagcgtaatagtgctcatacaacaaatagctgctgtctctttgcaggacgcttccgcgtttgatttcgcgactgattgtcgatttatgacagccaacttcttgagcgatgacagtacgggaagttataccagaatccagcattgcctgaatctgaccacgttgtacgctagttaattgatgatagtgtttagaaatgctagaatttgaattggtcatgaagatcttcctttcttgatttttcgtcaattcaagtttaggtcttcatggcctttttgtttaacacttagtgttgcacttcaattttaaatccaggactcatatttttttcactgtttttatttttttgtcttgatcgaatatagcttgagcaatatttttggtaaaatcattcatgaaggagttcctctttctgtatgttgttttttgttcaaaccaatcatacgagaaaggagctcctttttctaatgtttagggaataaaatttaaggaatcgtccatccttacacaaactattttacagtctctaaaaacagtatctttcaactataattactaaaagatactgtttctttataaaatctttcctaataaaaaactattccatcatagcgaccaatgtaattaatgctgcatcgtaataattcgtatcagtcaaacgattagtaaaaacatactgttgtgaaacaaataaattatcaaattccggtttctttaattgttgcactgcaaaaaagatcggagcactaatactcggtgaagcataattgtttaacgctttaccattcaattgatagccagcagtcacttgtttttgcttgctgaaaaagcgtaacattttagtaataattttctttgctcgtgcatctttgctagtagctaaaaataatggtacgcgacaagcattgccagaataatcaccatcattttttccagctacttcattggctttagctggtctaacaccttttttactaatccaagcaaaatctggaactaagccagaagaatgttgcttgctcaattgatatagttttgtcagcattaccttcttgatcgttaaccattgagaattaccagtcaactgataaaaatcatcaaagtacgtcggtaacacgtcagaggttcgcattaagtaataatacttcgatttcttattagcccaatcaccaacagtcagcgtctgagtagtcgaattataatcataacgtaagatatcagctaataatagcttagcctgctgcaagtacttgggttcgttccagagttttcccgctttaatcaaactttctgcaatgtataaatcgccatcagttgcattagtagaataaacttttttatccacttgcttccatgacattaattcagtttgttgatcatcgatagtcaaccgattagccaggtaaaaccgatataaccgttgaaaatcttcttttttagcccaccccttttcaccagccatagcagaaatcaacatgccatagccttgaccttcagacaagcttgtgcgtggtgcagcttttatccaagtttttccatcactttcttcaaccacataatcttctttccattgacggtacaaattacgatgcaaggtgcggttattactaccacgaacataaaacatgatcgcgataaaaagcccaatagtcagtaagatcaaaattggggtaatcctgtttttgttttttaacatcaatctgtaaacctctttgtttttacccacttcgttgcttcgcgatggaaaagtctgtcagcaattgctgaccaaaccgcattaatcgatataatgataaacagttgtgagtatgtaaaatatgatgccacagcaagccaaagttgtctagttgtaacctgaccaaattgggtactggcagccacactgatttggagtacatagagtagaatcatcaacaaccaattaaaaagtaatacttgactgagcaatagattcccagcagtaaaagtaaatggcatctcaactgttggtacccaaatttttattactgcaaaaatcagattaacaatgaaaaagatatctgataagactactgctgcattaaaccagaaaaagatactggacatataaaaagtttcaagtttgacccgccaattactatggtcaaataaatgccgaaaattgttaattactacttcgtaattacctttagcccaccgcaagcgttgataataatagtcctttagcttctctggttcttgttgaaaggcttcagaattatgtgctagggcaattaatttaccagtgcccaaaatcgtaaatgacaaatcagtatcttcagttaaagcaccagaacgaaaaccacctaactcttttaaaaaagccgtcttaatcacaaagttagtgcccggaatgcgcccaattttgaataattgccaaactccgcagtgctgaattcgatgcgttaccacaatttccaagtttatacagctagtcaaaaagttttgctttgcattccgcgtcttattccgtccaaagctagccacataacgttctggatcttccaatacctttttgatcaagaaatacaaggcattttcttcaggcatcgcatcggcatcataaacgcataagtagtcgccgtggatcatcttaagcgcatcgttcaaaactcctgatttaccaccttcaccagttcttctgatcactttaaactgtcgtttctgatattcagtccgattgccaatggcttcagccaattccgctgttcgatcagtgcaattatcagcaaaaatcaaaatttcgactttatcttctggataattcaagttcagaattgctttgctagttttttgaataacagcttcttcattatgagccggtacaacaatagaaacggtaggataatactcaagtggtgtaattttagcaatttctttactgtgttttaaccaaaaaagcaccccgccccaaagcgtaactaacgaaaatagaatcgataaccaaattgaaatcaaggttagtatctgaaagccttcagtcatccaattctcctttctgactcttcattaatgcctgttcgatattgccataaattttataagcacagaaaaaaatcactaaaaatgcaattgcaaagattacagaaataatcacggacaaataataaaaccagttcattttgctatctttcctttatgtattcagtcacaatttcagtttccaattcacgacgcaaaaaacgaattacagctatcaaatcaggaaatctatcactattgtcgacattaatatggacactcgcatgttttagcgaaacaggaatcggcaactctaactcgcttaattttgtatcaacgatgtgattgaccttttttactaattcattggggatttctggcgaaattatcaaaaaagtcgcatctcccataaagtaaataaactcccccttaagtcgattatttttcaaaactttagtaatctgcttcaggatccgatcatgactattaggatgagcttccgcatactgcttatgttgatcccaactcacaatttgaacgttggaccataaatcgagttcgggatgctgctcaattttatgtagttcattctgataaaatttttccgcactatcgaaagttcttagctttaacctccggtcataaagcgaattataatgccgaatttcgtcattgcgattggtaaaaaagctccagcgaatgatgtgctgtctaatgacggtaactagactagcctcaataggataagcaatcaataataaaaatttttccttaactggcattactacatagcctaacagtaagaatcctgctccaatcgtggtaagaattaaaatcagccaagtaacatcgactcttgaaaagattaagccggttaaaatcgccaaaatcaaaatcattactaggccattaaagacattagctgggtataatcttgctagccataataacaatatcgggaaagtaacgctggcaagataagctaaacctgctaatttaaaatactttctggtcatttttataacatcatcctcaattatgctatttatttacaatttttcattgtaataatttaggaaactgtcaaatcttttgtgtaaatagatctttctcgtaaattgattttttaattatttatttaatcaaagtaggattctaaggtgtcctgaacctgaccaaagcctttatgaattcgattgaaataacggtcattgtagctcattgcctgaatgccaataaaagcatcaagcgactgttcagttggaaactctgccttaggcttagctttgcgcttgatcacattgttaaatgattcaatcatgttagtcgaataaattgaagctctgatctgcttgggatagttataaaagaccagcagatctggttctatgtctttcaagcttctgataacatggctgtaaaccttgccccatttggtatagaagtcatgcaggacagctgtggcttcttctttgtttgtctgttgatgcacctgtttgaattcgttcatgatcttttcacgatcgtcgacgcgtactttagcgcagatattgcgcatgacatgaaccaaacagcgttgaaaatgagctttaggataagtcctggccaaggctgttttcatgccaacaacaccatcagaaagaaaaagctcaacttgctttaagcctcgggatttcatgttttgaagcatatctgtccagacttcaatgttctcgctaggtgcaatgcagtagtcaatgacctccttgtgcccattaggcttgatgccaatggcaatatagactgcttcacgctcaaatgtttctcggcgcaaaggaaggtatgtcgcatccaaatagacgcagaaaaacttgtcgcttagcttgcgtttgtggtaagcctcaacctttggaatcatctgcttggaaatatttgatacctgagctggactgtaatggctgccatacatcttttcaattagatcggctatttccctggtggtcacgcccttggagtaaagcttgataatcatgctttccaagatatccgagtgctgcttgtagtcaggcagcgtgtgctgatgaaattgaccgttgcgatcccggggcacttgcacttcaattgggccaaattgcgtatcaactttgcggaaataagcaccatttctagagttgccagtatcccagccatttctggcatagggatcatagcccagaaaggcagtcaattcagcttctagcaagttattaacagcctgttgtagctctttgcgcaataaatcatttattttgtctggattgaatagagcttgagcaaaatctttggtaaaatcattcatgaaggagttcttctttctgtatgtgtttttttgttcaaaccaatcatacgagaaaggaactcctttttctaatgtttaaagaaataaatttaaggaatcattcatccttacacaaactattttacagtctcatcttttagccaagagtattgtaatagacatataatacagtacaatgattattatcaattacataaaattgatgcaattaaaaattttaatcctgaaatttttccagtttatgacaaaaagcaaaaacaagtttattactttaataaagaagacttcaactatctggacgacacagatgccactttaaagaatctacccaattgggaaaaagactcgtacaagctgtattaagaatttcaaaatgattttgaaggcaagcgttttattgctcttccgtctaaagaagatttaaacgagaatagactaatctttgattactgctgccagcttgaaaataatcaactaggcaatctgttacttgatagttttaatggaagacatgcttttcgaaaattcaaaaatacactttatcaaaatcatcttctagaagactatgaaaaatataaatatcaagccgagaagaaattagcaaccaactggtgcaaagaacataatttaatctaaaaaacactgacaggtcaatttgatctatcagtgttttttcatttatcgatcaatttttggtgcttcaccaatctgtgcttgcatcatccagattctcttttcaatatctgtatggcatgacgttaagatatcatttgagccatagtcgccttcctcgtcacttaccttaatcccttcttcataaaggtgctccaaataacgataaccagcaatgatagtcgcaaatctttctctagttgaaattccccattcgccaggatgagcttcgatcttagtatgatcaagcacttcctgtaagcttgaatatggtgaaccatcaatcgtgatcaatctttcggagatcagatcacgttgttcatccaactcgtccattaccttgtccaagtatgggtgcaatttcaaaaattcaggtccgcgcatataccagtgttgttggcgcacaaccatcattaattgagtggtgtcagccacagcttgatttaaaatttcttttgtttttggatacttcataaatttgcccctttcaccaaaaataacttactttataaaatatatcatagctgatgaaagtgattacagcaaattatttgattatcaaaaaagtgcctagaaaatcagcttcttttcctaaacacttaattatctatttctcttctttttccttgcagtggctcttgcacatacacttttgctcatcggccatcgggcaatgacaaatgccatctttaccagcgcaagggcaaccatcttggcatttcatcccattatgacaaaacttgttttccatttctgtcacctcgatgccatcattatactctaaattttttgttcaatatcactaattttcacaactaaaacagctctaatccactcgaattgcgccttcatttgatcaaaataagttccttcagtgatgaacttgccactaccgtgaatgtgatagccgcggcccataccagttgtgccaggataattgtaagaaccaaccgcgattgtcaaagcgtgctcaggatctgccttcaaatcattttgaattgagtgcatccccgcagccggaatcaaaatcgtgtcatcagccactacattaatatactgtgaccaagtattcaccacactagccggcttaccgttaatcgaaacgattgtagcgggtcccttatcacgtaaaacatctaagaattcttctgtcataattgccataatttttatctcctctcaaatttgtaaatataatataaaggctaatcccgacaaaccatgacattatttaatattttttcataatctgcttcaacttagtgagataattcttcttcaattcactcggctgcaatacctgcacgtcgctgcctagtgaaatcagataatcaaccaaatagtgtaattcttctctattatactttccttggagataaattttccctgcatcatgcacaatattcataatcgggtaagaattatacttcaccttttgctcgccattttcagttaataagcaagaatacggcacttgataataattttcttcatatttttgcaagttggcagttaatggttctttattcattattttagtttcagttggtaaaacacgaactgcctcgaatttatctaaacgcaaaacgtaccattttttcaggtctaaattataggcatgacagaaccaattgcccgcctgaaagaaaatatcgagcagctgcagtttttgttttccctgcacaaactgaaaattttccacttcaattaagctgttatcaatgcatgccttaagcaaagtcacgaaaaactttacctcatttaaacttggctggctatagaaatgcactaattgtttctgcaacttaacctgctcttgtaaattctgcggtaggcttttaaccagtttcaattcaatttcatcatacgcattgctgtacggcgtctcactgatcccgcgaattgcttgcaatgcaaaaaagatggcgttaatttcttgcgtgttaaaccgaattggcagcagcaatttactattagtcaaatggtagccgccattgcgcccactttcagtataaaaagctagacctaattgctccaaatccgcaatatcgcgcaaggctgtccgctccgaaatagcaaaatgttcttctaattcttttagatgaaaaacttttttgtcactcaaataaattaattcttgattcaatcgttctgattttttcatggatttctgccatcctaaattagatcaatctgacgcaatttccttctcaatctgccttgttcttcgagtaaagcaaacttacgcgacaaagtttctggggtcgtaccaagatacaaagctagatctttcagttttaacggtaaaacaaaactattttgaccaatttcatttgcatacatttgcaaatatttgaataagcgctcttcaactttaggtaaagttaacaattgaatttgcttttgcatagcagaaatttttgtcatacttaactctaataatctaatgctcaattctggctgctgatggatcaacttcaaaaaatcttgtcgccttaataaacatatttcactattatcagttgcttcaacataactatgcgtattaacttgaccaaaaagccagtcttcaccaacataatcccctgtatgtaagacctgtaagacatcctcatgtccagtttcatctaatgtatatagcttggtactgccatgggccacaattactaaattagcacttacagttggatcaataactatctcacccttttgataattttgatgttgcaccaatctttctagttttattttttcatcttgtggcaaagccgtaaataatggtaccagatcaacgcataaatcagccattaaactcattcctttaactaaaagtcatcatcgtcttcttcagtatacaatccttctttgagatcatggcctaaaaaactttgacttactctaatctgttccttaatccaagcaagcaaatcaatcaaattagcagctaactctggccaattttcatcattagctaaggtaatagccttagtaataaacaaaatctgcgtatcaaaatccttcaccaagttgaataattgttgttcacctgcaagatatttgctactgccatcttcttccaacatggtatattcctgaaattgcttgctagtagtcggaatactttccccgttattaactaataaatggtttaaacgcttgaattcttcatgctcatagttcagccactctgttgccttatctgctaagaataggcttgcactgccttgagcaaacaagcttgcttgactgattttcaaagaatgaactaacaaattagaaataatatgaccagtcattgccgctgcagttggctgatgatgatcaagatcactttgttttaattctgcttgatacttttcttgtgcattcatcaattaagctccttttccttgattccttgtacttcataacccatcttttcaattgcagctttaacatctactgctttaactttgtctggatccatcgtaaacttgagcttccccgcattgaacattaccttaatttgatcagttccatccaaattatcaactgctttttcaatcttagtcaaacatgaaggacaagtcatacctgccaatttcatcattactttttccatttatctaaatttccttcccattagtttacatgtttaatgctacatcgatttgttttttagaaacttgatgatgatcaagtttttgcttaaacctaattaatcgcatcccatttaagataacaactaaaatactaaattcatgaataaacatcccactagccatttctacataaccagcaaatagaccaataaatagcagtaatactgttaataaagcaatagcaatattttcgttcatattaagaactgtcttttttgctaaatctattgcataactaactttacgtaaatcatttttgactaaaacaatatctgaaacatcaattgcgacgtctgtcccacttccaatcgcaatagcaacatctgcgttagccaaggcaggactatcattaatcccatcaccaatgaaagcaacgtgataacccttttcctgctcctttttaacaaaagcagccttatctgctggcaacatttcgccataaacttcatcaattggtaattctgcagcaacttgcttagctgttttaaaattatcacctgaaagcataactaattttttaacgcctaatttcttcaagcgagttaaagctattttagcctccgggcgcaactggtctttaataccgaataccgctaattgactttggtctgcattagcaaaaacaacaattgaatttcctaaattgcttaaatgatttatggtatgtaataattcctgattaagatgagtattttcagtaattaaattttgattaccgagataatatttttcaccagaaatagtagcaattaggccctttcctttaacggtttctactttaatcacatctgatgcttgattatctaacttggcaatcgcctgagctaaaggatgattactttgttgttcaatttgagcagcaagcctaattatttcattccgttgcccctttagtattttgatcgcactaacttccggatgacctacagttaaagtacctgttttatcaaaagcaatttcgtcaatcttacgagtttgatccattacttgagatcctttaaaaataatgccattctttgctccattaccaatacctgccactgtcgacaccggcacaccaataatcaaagcaccgggacatcctaataccattactgtgattgctagtttaagatctctagtaattaggccaactataattgcgatcaccaaaacggcaggggtgtaatatttagaaaagcggttaatcaatttttctgcatgagatttggtatcttgagcttcttctaccatttcaatgatcttgccaaaagttgtatcctctccagctgcaatagtctcaatcgtcaatgttccatcttcaagaattgtccctgcataaacctgattgccaatttttttattagccaagctagattcaccattgatactagcctcattcagatagccagatcctgaaacaatttttccatcaactggaatttgatcacctgttttaactaaaatccttgtacccggatcaataaaatcgacgtcttcttccttagtggagccatcatcttgcattaccaaggctgttgttggagccattttggttaaatctgagatagctgagcgtgttttcttcaaggtgacttcctccaaaaaatcgcccagcataaacaaccaagttacaatagctgcctcattaaattcaccaataataaacgcaccaagtactgctaatgaaactaaaacatcaattgagattaatttaaccttgatagatgaaattgccgttaaaacaatcggaattactccaataatccccacaaccagcattaacaactggtatggcagatttaaatgtaacaaccattttgatccctctgccaacaataacaaaattgtatttaaaagcaggatttgctttttatactttatgaaaaagcgttgtactttaatcattttttcccctttcctttacctgacgattattatcataaaagcaaaagaactctaaaaacttgatgatgatcaagaaaatcaaagatttataatttaatttctgtcaatatttgtcagtatttgcgactataataatcttcagagaaataatgagcaagaaaggtgacaatcatggttgatattttaactaagcaaactactaatcaagaattcttagactttgcggtcgagcaagttcacaacgccgatatcgttactactcacgcaggcgagcctagcgcccaagtttgcgacttattattgaacaaaaacggtaaattatatatcgcaacttcaagtcaaaatccattttttaaggatttgattgctcagccaaaagttatcgtggacggttacaaggggggacggaacgatggactattgcggtttttcaattcgtggtacaatcaaaaatgttgatcacttatatcttgatgaaattttcgccaagaatccttatctcaatgaaatttatgccgatgacctagaaggtgctaaaaaagatttacgtgtccttgaaatcacgccaattaccgcgggctacttggattaccgtactaagccagtcttcatgcgcaacttcaaattctaaacaaaaaaatcagagctatcatttcgacggctctgattttttgttttttcaattaaaagaagattttactcatgatgatcataaagaccaacaaacaagttgagctgattgcggcagcaccgaacacggcaccaccgcgcttgaagatcaccttgaagttaactgagattcccaaggcagccattgccatccctaaaaagacatatgcggcttgcactaagagatccagtgtttgagcagataatggcaaaaatgtcccgataatactcgttaagataaagccacccaagaaccaaggaattggcaatttctttggcgccttggtatgttctgcctcactttcagtcaccaaacgcttttggtaccagtaacccacgattaaagcaaccggtgctaataacaacacacgtgacaacttcataattaaggagctatccaagctgatctcaccaaacgcactaccagcggcaaccgcgtgagcaatttcatgtaaagaaccacctgcgactacaccatattgtgtgtcggttaagccaagcagcggcttaagcatgatctcaagtaatgtgaacatcgtccccatcacacagacaacggccactgccaaaacttcattttctctttttctttcttcatcagtggtctcaatctgtggtgacacacccatgacggcggccgcaccgcagacaccacaaccacatgctgaaagaatagcaagctcatcttcggcgccaaatttgcgactcagccaataagtaagcacgatcgtcccactaactgcaaacgctgcaactaagattgtcttcacaccagcatcagccaacttggtcaaattaagccgaaagcccaacaaaataatccctaatctcaaaaacttgttggagataaaacccataccacttttagcttcagtctgaacgctctgcggcgtcacttgcaatgcaatccctaacagcaatgcaattaccaaagctccaattaagtttacatatggcaacttagccaagaaaattcctgctacagaacaaaataaagtcattcctgcagctaaccaaaatgatttagttttaattatgtttgtcaacaaaaatccctccgtatgtgatcaatttaatttgacaaacacaactcccttaatgatgatgtctataagtttactcttgttttctatctttgacaaggtatattgttaattatttcacatttattcaaaaataaaaaaagaccaagtatctgcttgatcttccacatattgacaaaaaggagtgtacaggatttgaacctgcgcgccaaggaaaacttggttcgccggatttcgagtccggtgcattaccactctgccaacactccgtaacaaaaatattataacctattatttgaataatgccaaaatatctttattattttgactgtctttttgtctccgtaactgctacactttgcagtagtacatcgtactagtaaaagatatagaaaagagaataaattatgtgtacttctattatttttagtccacaagatcactatttcggccgtaacctcgaccttgaagttacctttggccaacaagtagttgttactccacgcaattacgtcttcaacttccgcaagatgccagagatgaagcaacactacgctatggtcggaattgcgcttgacgctggcgattacccactttactttgacgcagctaatgaaaaaggtttaggcatggccgggcttaactaccctgacaatgctacttactacgatgtagttgacggtaaggacaacattgcttcatttgaattcatcccttggattttggggcaatgtgaaactgttgctgatgctaaaaagttgcttgaaaagatcaacatcgttgacatcaacttctccgacaagatgcaagcatccccacttcactggttaatcgctgataagaccggtgtttcaatcgtggttgaaactgacaaagacgggatgcatgtttacgacaacccagtcggctgtttgactaacaacccacaattctcaagtcaattattcaacttaaacaactacgccgacgtttcaccagcaatgcctaagaacaacttctcttctaaggtagcaatgaacggctacagccgcggccttggttcacgcaacttgccagggggtatggactcagaatcacgctttgttcgtgtagccttcaacaagttcaacgctcctgttggcaagactgaagaagaaaacgttgataattacttccacattttgcattcagttgaacaacaaaaaggccttgaccaagttggtcctgacgcattcgaatacaccatctattctgatggtaccaacctcgacaagggtatcttctactacaccacttacaccaacaagcaaattaacgttgtcgacatgaacaaggaagacttagattctgctaagttaatcacctacgacatgttgactaagccaacttttaaccaccaaaactaaataattaagaaataatgttaattttgtctaaagattagcattatttttatttttacggttaaaatagatgtacttattaaagtaattggggattttcttattaatgaataattattttgtgttgctgctttcggcggtaattttactctggcttatttttaacatcaaaaattcacgtcgttttaacctttttgaccattggttacaccaccagttggtgaaacgtcacgacggttatagttggcaagtcatcgccttcatcaatgatcctaagttaatggtagtttgggatgtgctattagcaggattattactaaatgaagagcgtaatttgactgccctttgggtgttagggaccttgggctttgcggatatttctggtattattttgaagaaattaatccgtcgccagcggccactaatgcattccgacaaggaagatggctacagctttcctagcggccacgtacttggggcgacaaccatggggttaattgttttgcaactatttgccaaggatttaggtaccggcttcgtcattgtggtcgttgcactatgggccatggtgatcttctctcgtttgagtttgaaggcacactacccctctgatgtattaggagcaaccagtttagccatcgtttgcttcagcatttcacaacagctatttttagccatttaaaaagatcacgtttatcgcgtgatctttatttttttattcgtgaaaaccaaccataatgccgccttcttcggcgtagaaactacacaggccatgcatcggtcgaatcgttatttgcgcatcaggatattcggctaaaatcttttccttaattgtggcagcgtctttttcattttcgcagtgatcaataattacttcgccgccgtgataattatcttccttcatgtacttgataatttcacggattgcctttttcattccgcgcgccttagtcagcggttcaagtttaccttctttgctagctgtcccaatcaaattgatcttgagcaaacctgcgattttggctacagctggtgaaacacgaccgtttaaagataaattatgtagtgattgcaaaacaaaaagcaaatgagtctgcattctaaacttagcaattgcttcttctagatctacaaagcgcatttcaccttgcagcattttctcaataccatggactatgattgctagctcaggtcccgcacttcttgaatcaactactataattttactcaagggatgtttttcctcatacattgcttttgcctgaagggctgaagaaaaagtgccactcatcccgctggtcattgtgacgataatcgctttttctgttccttcaagtgcgtcaagccatgcttgaatacttggacaagttgttttgcctgccacattattttggttcatattggacaaaaattccttcatattcaaatcttgattatcaaggtaatccttaccaccaaaagaaattgtcagaggcactacttccaaattacgcgccggatcattattcatattggcacttgagtcaacaattaatttaatattttccattttagattccttattttttgtatttattttaatacatatattatagtcctttgatatagagttttttaggctgctttactaatttttaaaatgtaaaccgctttcatatgtttacaccgtcacaaagttaggctaaaatttgagatgtaaagcggagcaaaaattgttccgtatggtatgaaaaacataccataatttttgaggaggtttattaatgctcaaatcagttattgaaaatgtacacgcacttgaaattttcgactcacgtggtaacccaactgttgaagttcacgttactctttcaaacggtgtcgtaggtaaggctgaagttccatcaggtgcttcaactggtgaaaacgaagctgttgaattacgtgacggtggttcacgtcttggtggtaagggtgtttcaaaggctgttaacaacgttaacactgaaattaacgatgctcttaagggtatggacccatacaaccaaccaaagattgacaagaccatgattgacttagacggtactccaaacaagggtcgtcttggtgccaacgctatcttaggtgtatctatggctgttgcagttgcagctgctaacgatgctcaccttccattgtacagataccttggcggtactgatcttgaaatgccacaaactttccacaacgttatcaacggtggtgaacacgctgacaacggtatcgacattcaagaattcatgatcactccagttgctaagacttcattccgtgacggtttcgaaaagatcgttaacgtataccacaccttgaagaaggttcttgaagacatgggttacgaaactggtttaggtgacgaaggtggtttcgctcctaacatgaagaactcagaagaagctttgaaggctcttcacgaatcaatcatcaaggctggttacaagccaggtgaagatatcgctattgcatgtgactgtgctgcttcatacttctacaacaaggatgatcacaagtaccaccttgaaggtaaggttcttactgatgaagaattagcagattactacgacaagcttttggacgaattcccagaattaatttctatggaagacccatacgacgaaaacgatgttgaaggtatggttaagttcactaagagccacaaggaccgtatccaaatcgttcttgacgacttcatttgtactaaccctgcacttttgactaaggctatcaaggaaggtgctggtaacgcttcacttatcaagttgaaccaaatcggtactgttactgaaacccttgaaactatccgtctttcacgtaagaacggctacaacactatgatttctcaccgttcaggtgaaactggtgataccttcatcgctgacttagctgttgctgttaacggtggtcaacttaagaccggtgctccagctcgttcagaacgtgttgaaaagtacaaccgcttacttgaaatcgaagaagaacttggcgatggtgaacgtcttgccttcttcccagacgatgttgatcacgattaatttcgagttaaccgagtacaatttcaaaaaaagcatgagaattaattttctcatgcttttttgcttactcatttaatctttattttactaattgactaaagattttattcagagatgtatctttaactactttaactacaattgggttgccattcctagactgatcaagcaagataaccggcttatcagatttaaggcagaataagtaagtattgtgccaagatttaaagtcatcattagcaattgccagcacattataatcatattttgccttgcccgttggactgtagcctatcttaattgactttttattcaaaacaaaccgattagttgctagcactccaggataagttgcaccctttttggtctttaaattctttttcccatcataaaactgataggtctgaccggactttttaccccagttattgactgcagtctttaacttggctgtcttagctgtattccaaattacaacagccgactttttagtcctatttttcttattctctttgattttctttttcgagtcttttttaggcttaatcttcttggaacttgaagattgtaccttggcagatttagccttttttacgtttactgttttcttattttgttttacttcaccaatcgtcactgcatctttaccaaaatgtacttgactacaacccgtcaaagtcacagctaaagtgactgcagcaatacctacaaaaatttttctattcataaatagctccatttgttatttcttatgtctattatcacacaaaacctccctctttaaccgctgtttaaataaaaaaagagctaattttcatatcaatgtcattaagttaagacattgacaaattatcgacttggacttttaagatcattcatttgcgatttatcgcatttgaatgatcttttttcatgccaaataaacccaaattttgtttagaaattaggctacacgatataaataatatacagctgatttgggtttgagatttcttttgtcttttcgtcctggtctgatcggaattgtgtaatgactaatttgaataagaatctttttaaagatttcagttgaagaagaaattatatacatagcctggatgacaaaacatgactgtttgaaattgatcgcatattgatacttgcagtttttttgtggtacatatgcttgagcatcaatttgactgactgcgttaaacataatcatgtgggcatagatctccatttcaataaatctatcctgcttggaatgaaactgtacgctacctaaagcatatttcaactttttgaatgaagtttcaatgccccagcgcaaatggtagatctctttgatcctttttaagggataatcggctctatttagattagttagaacaacttcccattcttctttgcctgatttaggatcattaattctaaatttacaggcacgaaattttattgtacataactctccaaagtcccagctgccatctttggtatttttagaccgatattttatatattgacggtaatgatggttaaccaaatgaacgttttctgtagccttatgggtttcataataataattagaggtagtcacccagcaagctatatccttatcacactcttgattaggcaactcagctacttccttaaatgcgccatatcccgttttagtacgtatgacataataacagttaggcaggcgattacaattttcaatcatgttaaagccggtataacctcgatccatagtaactatatatggtccgcaatttagctttttaagcatttgaatggcggctttacgttcatccatctttgacttaggctgaaagatgcagtcttgataagtattatttaacaggtcatagagtgcattaacatgaatttggcaatatggctttcctttatgattgagatttccaacgatattctctgatttaggattccagatttgattaaaatcagacccatcaatggcaaatatacgatatttatgatcaaataactggatattaaataaattctgattaaatacagttagaatatgcttaaaacatgcgggtgaaagctgacctttgcgttggacataagcggaagtactgactactttatcgttatttttaatagctttttggccaaaagctctaaacaactcactggtcaaatcttttccttgcatattaatagtagttttaatgactgtagctgcatctaaaaaccgcttcctagtgaaggcatgaggatcatcgataaaatcatgaatatgctttccagtatcattgataatttgatcaagacgatctaaaatatttctgtgaagggctttcataattaacaccagctttctggcaataattttgaaggtttaataatttaatcagagggcgaaaaggtaggttcttttcgcctttattttatgcaaaaaaagaaccaaatcataatgattcggttctacagagattagattcaatttgtcaatgtcttaacttaatgacattgattttcatattagctctttttaattaataaattgtaacttgataacgatttgaacgatccgttgcttccggtttttctccaatcttgccaaccggcacgatgacactcgtctgaaaggcaggatcaatccccagctccttctgcaattcgctgtcatcatttaatctagctgcaccgcccattacataaactgagccaagacctaagtctgtcgcctcaagcataatgttctctgcaccacaggatgcatcgcgctcgccaaacatgctgtcttttttagtattaattataaataatactggggcatgataacacgcattatcggtcttcgtctcaatcttgtcgcgcaatgcttcatctttaacaaccaccaagctcattacatctgtctgatgcattccacaaggagtcgtttgaaaagcagcaattagactcttaatctcatcgtctgaaatagattcactgctaaagtttctaacagctctccgatttgtaaaaattgaattaaccatatatgcctccgtttttactttacatgcctattttagcattcaagattttattgacaacgttttcatgaataattatgatggtggtaaaaagtatagatttttatgaggtgaatacataatgaatttagcagcaattgatattggtggtacaacgattaaactcgcaacttggaaagatggcaaattacaaaataaccatgcagttgatactcctaaggatttaaatggcttttatgatgttttaacagcagaaattaataaaatcaaacaagatactaaaatcgaaggagtagccatctcctcacccggtgccgttgatcaaaagactggaatcattggtggctcatctgccttgccttacatccataattttaagattgttgacgaattagaaaaaagatttgaattacctgtatctatcgaaaatgatgctaactctgctgccttaggtgaattagctgctggtgctggaaaaggttgcaattcaatggtcttttttgttatcggtaccggaattggtggagccttaattattaatcaaaaagtttggcatggggctcatctttttggcggtgaatttggctacatgctaatgggaacacatactttaagcgaacttgcttctccggttacaatggctaaccattataatgaaagaaccggtaaaaatcttgatggtaaaaccgtttttgccttagctgatcaagatgatcccgttgcaagcgatgtccgctctactctaattcattccctggcagttgccatctacaatattcaacacagctttgatcctgaaaaaatagttctaggtggtggcatttctaacaaccctgagttaattcctctcctaaacaaagaaattgatcaaattgaagcaaattcagacttacataccttaaagcctgtcattgccctctgttcactaaaaagcgatgccaacttgcgtggagcagttgctaatttcgagcaaaagcatcaaaattaatcaaactataattgttattttatctaaaataatctttctacaagcctatataaatgggcttttttctttatgtaaattaaaagtatagatttttaactaattagatctttattttcattattaatctgatatacttatttatgtagataaataaaagtgcttacagagggagaggagaaatagatgtctgaaaagcgcaaattgccatccacctttttctggggcaactcagtttcaagtatgcaaactgaaggtgcttggaatgaagatggcaaaggtctctccgtttatgatgttcgccctgctactgacaaaacaactgattggcatgtagcaattgatgaatatcatagatacgatgaagacctcgacttaatgaaagatatgcacctgaacatgtatcgaattcaaatttcatggtcacgtgtatgtcctgatggcgacggcgacttcaacgaaaaaggtatcgacttttatgatcgtttaatcaatgcgatgcttaaacgtggcattgaaccaatgatttgtctttaccatttcgacatgccactgaatttagctaagaaatacaatggctttatgtcacggcatgtagttgacgcgttcgttcgctttggtaaaaagatgattgatcacttcggtgaccgggtaaagtattggatcgttttcaatgaacataacctttacttccaagatgaagttttcaatatttcaggttatgaacatggtgaaaagagcttagatgatatgtacaccatcttccaccatacgatgatgtgtcacattcaattagctaattacatccacgaaaattattctgatgtaaaaattggcggtatgcttgcctaccaacaaatttatccagctaccagcaaacctaaagatatttggtctgccaaacaagttcaagaatttttaaacttcaatatttatgatgctgatactggtcgtggttactcaccagaagtaatgcaatatgccaagaaccatcacatcaacatggatatcactgatgaagacaaagaaattatgaaaaaagctaaagctgacttccttgccttttcatattactcatcatgggtattatcaagtgacaaaattcctgccggtgaggctcctaaccgctaccttaaccaaggcggcgtagaagccaaatacgtaaaaactaacgattggggctgggcaatcgatccacttggcttcagaaatgcaatcactaccatgtataactactaccgtattcctattttccctattgaaaatggtattggtcttaaagaaacatgggatggcaagaatatgatcgaagatgatgagagaattgcatatcatcgcgatcacattaaagccatgaaggatgccatttttgatgatggtgctaaggttcttggctatctcggctggggcttaatcgatattccaagttctcatgctgatatggaaaagcgctacggtgctatttacgtcaacagatcaaatcatgacttaaaagacttaaaacgtgtacctaagaaatcattttactggttccaaaaggtacttagtgataatggagatgaattataatggctgatcaaaaacaatctggatttggcttatgggttaaccaacacataatgccaccaatcatgaaattcgttaacactaaagcaattaccgctctgcaaaatggtatggtttactcactgccattcattattatcggttctattttcctgattttaggaaatattcctattaagtccgttgcagatgcaattaatgcttctggttggggtgctatttttgcacaagccaacaacaccactttccaaatgatgggtttgtgggctgctattggtattgcttatgtttatgttaaaaacgaaaattacgaacctttagcaccaggtcttacttcagcagctgctttcttaatgctacaaaacttaagcattgataatccattaaaggctgctttaacttcaggtcttactgatggttcaatgacaggtaaagtagtaacagaaaacattgataaattgcctcatgctttacaatcattcttagaatcacctgttactggtgtaattaacactaagtggcttggtggtgacggtatgatcgctgcaattatcgttggtttacttgttggttggatctacacaatgattatgaaggcaggttggactattaagatgccagctcaagttccacctgcagtatctaaccaatttactgctatgattccttcaggtgttatccttacaggttcaatgttgatttatgctgcatttaatgcatttgcacacactgacttcttaaactggatctacaatactttacaaattcctcttcaaggtatttcagactcattcggtggtgctatcgctattggattccttgtaccattcttctggttcttcggtgtccacggtggtttgatcatgggatcacttgttgctccaatgcttcaagccaacactgctgacaacgctagattattcgctgaaggcaaacttactattgctcaaggtgctcacgttgttactaatgaattctacaacaacttcattaacttaactggttctggtattactattggtttaattatcttcactttagttgctgctaaatcagttcaattgaagtcaattggtaagttagaattagtacctggtatcttcaacattaacgaaccattcctcttcggtttgccaatcgttatgaacccaatgcttgctgtacctttcttcttaactccattagtagttgctgcttcaacttacttggttatcaaaactggtattgttccaccacttaatggtgttgccgctccatggactacaccagctgttatctctggtttcttaattggtggctggaagatggccatctggcaggcatgtacgttacttatttcaacagctatttactggccatttgctagaaaatacgataaggtattgctcgctaaagaaatgaaagaagctaaacaagaagcaaataagtaaaaatatgctaatcatatgaaattaaatatagttttagaaagagagatgccattaatgcttgtaaaatagtaaaaatgacgtctcttttttgataaagtatagacttttgttttaaaatagaagtataaaagtaaagaagatgaaaaaacatggcaaaggcaaaatatttagaggtcgcaagtgaattaaaaaaacgtattgaaaatggtgtttacagtaagcaagagcccttacctgatcaagaggcattcgctaaagaatttgacgttagtcgtctgactgtaaaaaaggctttcgatggtttggagcgacaaggactagtttataaacaatctggcttaggaacatttgtcgcaggcgaagttccaattaaatctgatattgattctcccgtcaatgcttttactggtttaagaaacttactaggaaaaaacgaagttacaagtaaggtgctacacttctctgttgagtttcccgatgagcaaatacaaaagaacctcgatctaaagcgaaatgaaccagtctataacattgttcgacttagaatctatgatgatcaaccctacattattgagcatacttatatgccaattaagctggttcccgaattagatgagaagattctacatgcatcaatctataattacatccatcaaaaattgcatttaaagtttggtcatgcttatcgaaaaattcgtgctgctaaacccaacgaatacgataaaaaattcttagatgctaaagatgatgacccaatgcttgagctagaacagatcatttggcttacaaatgggcaaccaatcgaatattcaaccagtagaaatcgatacgatactcgcgattacgttttattagataataaccgattttaggaggtattttatggcattctcaaaaaatttcacttggggtggcgctactgctgctaaccaatatgaaggtggctatgatgaaggtggcaaaggtttaaatgctgttgacgttttaactaatggctcagcaactgaaccgcgtaaggtaacttggaaaaagcctaatggtgaaactggagctacgcctctagtttgggggcaagaatttagtctacctgaaggtgctgttccaactattttagacggttactactaccccagccaccaaggaacggacttttatcaccactatcaagaagatattaaattaatggccgacatgggctttgatgttttcaggctatcaatgaactggtccagaattttgccaaatggtgatgacgaacaacctaatgaagacggattagccttttacgataaagtatttgatgaatgtgctaagtatggcattgaaccactggtaactttatcccactatgagacacctctttctttaattacccactacggtggctggaaagatcgccatttaatcgatgctttcgttcactactctgatatcgtgatgaagcactacaaaggcaaagttagatattggcttacttttaacgaaatcaacgccatggacatggctccttatatgggtggcggtttaatcgatggtagcgaacaaaatcgtgctcaaggtgctcacaatcaattcgtagctagcgctaaggtagttaaattagcccatgaaattgaccccaacaaccgtgttggccaaatgctagcttattctgcctactacccttacacttgtgatcctgctgatcaacttaaagtgatggaagccaagcaagagatgctcttctacagtgatgttcaaactggcggccgctaccctaactatcgtcttaagaaatatgaacgtgatgggattaagcttaatgatacaccagaagattatgaattaatcgctaaatatccagcagatttcttaagtttttcttgctatacttcaaacgttttaaccactcatgaagctgatgctaaagctaacggtaatgtttctgctggtggtgtagttaacccatatcttgagagtaatgcttggggctgggcaactgatccagatgttttacgaatcggcctaaatgagctctgggatcgttaccacaagcctctatgggtagtagaaaatggtttaggttctgctgacacccttgaaaaagatggatcaattcatgataactatcgtattgattacttacgagaccagatcaaatcaatgcgggatgctgtcacaattgatggtgtcgatttgatgggatacactacctggtcagcaatcgatcttgtctcaaatgggactggtgagatgaagaaacgctatggttttgtctatattgatcgtgatgaccgtggcaatggctcactcaagcgttatcctaaagattcattctactggtataaaaaagttatcacctcaaatggtgaggatttagactaaaacttttatttataaatagagcctagctaaaaagtgctagactctatttttctaaaaagatatgatgaaagcataagtaatatagatgagagaaggaaaagtatgattacaattactaaacaattcaacttcaaggctaaggacttctttgattaccttgaagaacaattaattcctgctattaaaaaagctcgtggtaatgacatgccggtaacgcttgctaaaggtactaaatacgaggtggatggtgcccaagtagaattaaccgattacgaaagaaacaaggtctatggggctcattttaagacagatcgaatggaattagtgattaaatatgtcactgaggataacgatcaaggcgtaaaaatcaccttttctgaagacatgcttagctttgaccgcgagaaacacggcaaactccaaactatgttttacaatttccaattaaagatgggcgcaaagaaaaaattaagacgaatgggtgacaatgttttagctaatattgcagcttaaaatcgccatctcagcagcaaaaagaccataactacttctaattgtgttgtagttatggtcttttttttgttcaaattaacaatcttatctatatcaaaattaatctattagttcttagtagcgtcagcctgttccttcttcaataagacattgtcatagtgcttgatgaatgggaaccaaactaagaaagcaacaagtgcacaaacaattgaaagcacggcaccttgccagctagtagttgcaagataaccactcaaacccactggagttggccatggttgttgcacaataatcttaggtactaaatgtgaagttactgcgatgtaacccaccaagccagaagcaagtggagcacaaatgaatggcacaagcaagttaatgttataaacgattggcaaaccgaataacaatggttcattaatattaaaaatggcaggaaccaattcaaccttaccaatttctttcaattgagctgaacgagaaccaaaggctaaccagattgccatccctaaagtagcacctgaaccaccaataattacaaaggagttcatcggatcacctgcaaagaagtgattagcaccatttacattagcagccatattagctaaaacaattggagtatagaatgagctcatgatagtagcaccatgaattccgaaccaccataagaagtgaatcaagaaaatgataatcaaaaagccccaccaagtatcagcaattgcactgatgaatgagaatggaatgtaaagaacttggaaaatatcagttcctaaagttaccaaaattagttcaatcaatgcaactacaacagcaatacaaaagcctgggatcaaagcgctaaatgagttagaaacaccagatggaactgatgcaggcatttttattctccagttgtgcttaacagtgtaacggtagatctgaactgtaagccatgcaattactaatccagtgaagataccaacggcagcaattctggtaataccatttgttgaggcttcataaccgcctgccaccattttagtcttagtaaatgtagtaataaattgaacagcaccatttttccaaataagttccagaacagtaatgaagaatgccattaagaacatcatcaaaccgttcatcggtaccaaatcaattttctcttctcttcgataaatatccgtgtatgaataagcaaaagtacctgcaaatactaatgccaagatacccatagtcgagttgtaaactacttggaataagccactaaagcggcctaaagtattcgcataaaatgcggcaaatcctggaattggaaatgcttgaggcagcacattcaaaattaagaaaactgccccgataattgaaaatgaaataacgctataaccagcgtccataatagctctaacaaaacgtgaacctgcaaatttacctgcttttgcagctagcgcatctttaaaagagccagattttgaatcagccatatttctttcccccaatattctgaaacatcattaaatctgaacagccttattatagcgaaagcgttttctaatgtaaacgtttttattgatatacgatatattttggttttttaaaatgtatatttttgaaattacttctaataaaaaaagttcatgtaactttacatgaactattgttggtgcttcttaaaagtctctatcaccttgtgataacgatcttgatcattcataatttgatgaattcggtattcgctccaaacacacaataaaatgccagctaaaaacaaagttgtcataaagaacataatactttgattttcgatgaatgggaataaatacttacccaatggcaaaaacgtcaatattataaaaagcaaatttaaagctgcttgtacttcaagataaactctgctaattgggacctctcgttttcgattatgcattttagttaactgctcaatcgaagcaatcccactataaattgtcataattgccgaaacaataatgccaagaacactatgataatttacatcaataattagccacatcaagttggtaaaaaagaagatagtaataatatatctaattaacttaaacttcccacactaaataagccagtaatctcttgatcttgcttggctttaggcttctatattatttttgctagttttctttaacaatttttgcatgtatttgggtaaacgattgataaagtcagccgtgaattcagctatttgtgcttcactggcatgaaagacttgctttacgctggccagcattgcatcagtaatcaattgcaaggaatggctaaaagtaatgtccgccagctcatcaatcatgcaatagaacagctcgcctagcgtgcgttcatcttcatcgtcccgcttggcaactgacataagcatgtagcgagtaaaaactatggcaacatgagcggtcaaagcatcgtaagacaggccatgatattccgtacttagttttagataacttttgcaagttttgaaaaaaccctcaatatcccaacgcttgccgtagttgcggataatttcatcttcgctaagcgacatgtcggtacaaatgattgccagccaatccttgcgattggcacggtttctaacgcagacaatccgtgcatctattttagcaccgtctttgtcctggcgtccgactttgactgggattgacagcaggtagcgagaacggccgcatcgctttttacagctgcgataaatctgtttgatgtttttgcgttctccctcaaattcatatttgattttggagctaaccttaaccatggcaatcacatccagcttcctttgcttgagctggacgatttgatgtggatttgagaaccagctgtcaaacagcacgtacttggcttgatgacctgctttcatagcttggtcgattaaattaaccatcacgtctgtgcctttagtccgggcaagcatacgtctttggccagcaatggtgcgctgatcaaaaactttattttcgccaatcatattctgtagcttctgagaagacagcagcactgaattgattggcatgaaagaagctccatcagtccagcccagggtcatcatgcgaaaacctttcttgtaagtcattgatacatggtcaaaaactttggcgactaattctgttttcttgaagccggtcctagagaagtaggaatcatcgacaacaaagcaatcagcccgtttttctgaagtcaaagatcgcaagtggttattaatgatttgcgcagacagaagtgtggtgaagtggagccaattgacgtgaacgttgcgcataaaacggtaatatgagttcttggaaaaattttcttgaaaatgatccattttcagctgcatatataagctgcggtcacgaaagacattgcttaaaacgtaaagaaacaagctgaacaggctaatgcctttttccttgcggaagccacattttctcaacagcttgatcacctgaaacttcttgatgaagctgatgattgagtttgaaaatagttgttcattttgttggtcaggagatggtaaaatagacattggcacaagcctttcatgcaaataaattatgttttggtcaatataattatagcaatgaaaaggacttgtgccttttatatttgtcaaaacacgcagaatcacaatgaaacaagcaattttgcgtgtgggaagtttaagtaattaacaaatatcgactaaaatacatatacttaatgctatcttcatgtcttttcttagccgtctctgtctgttcttttttaatgttttgtttattcatttttcttcgtctcatttcttgcctaataattatatttaagcacaaatcaggcaaaaattatcgaaaaaaataactcccgcattcgcaggagttattttcattttcaacgattacttatcttcttttttaagagagccagattcatacagcttttcgtaaagatcaaccatttctccagctaaatctctaaaagtgatagcattcatcaagtgatcttgagagtgaactaccaacaaagttacatgcatgtggtcgccttgagcttctttagttaacatgccggtttgtgaattgtgagcttcaagaagtgatttgtcactttccttcaacttttcacgagcacctgcaatattgccttttttagccaagcgaattgcttcaaaggctaaactctttgcattaccaccattggcaattaaacccatagcagccattaaagtttcttgttctttttgttctggagttttcttttcttctgccataaaatctgtctcactttccttagctattttagctaattaattattcacctttgatcaatttttcagcttgtgccaaaacgttagcaccattcatcatgccgtaatcttgcatattaattacgtctaaaggaatgtccttaccgtctttacccttacctttaaccttgttttcgaagtcacccttcatgtaacttacttgaggcccaagaagtacacaatcgatttcttgttgtgccatcttgtcatcagcttctgatgctgggcaagcaaagatttctgcatcaataccttgttccttagcagcagcttgcatcttagttactaagagtgaagtactcataccagcactacaatttaacatgatagtttgttcagccataataaatttcctcctgaaatttttattttatagtttaattagcttttattgatctacaccaattattataaagcgctttcattgatttgtaaacaaaaaattatacatgcacggcttagtcttaccatgcttatataatcatctcaagcaaaagatatatacttttatctcctgacagccaatattatataccctttgtaagcatttttaaatacatatcctcagcatgttaagcaaagtcctttgcatacgtatgctttaacataaaaaataaattttttttagcaaacgctttcaattaataaatgaatactgttagaatgtatatgtaatttattcctttacaatagaaaggaggcagaatcttgagtcgctatcaagacattgccaatgatatagaaaaagatattattgagaaaaaatatacaagaaaactacctgaacaatttgaactggcccaaaaatatcaaactagtcgggtcacaatcgttcacgccttaaagattttacaaaataaaaaattaatacggactgtcaagggacatgggacctttattacaagcaagtctattcccgacatttttcttaattctgatgtcaatgagcataccggctttactcgtcatgtcaataatgctctcgcaataaccagtaatgtgattgcctttaacattcgcaaacctagtattagtgaacgaaaagctctttgtttagaaaaagatgacgaagtttacgatattattagacaacgaattttaaataaaaagccagctaaattagaatataccgtgatgccagttagccgcatccccggtatcaccctagatattttgcacaagtcaatctactcttatattcaaaatgatcttgggcttaagatcggccgagcagatcgcattattacagctgaaaaatctgatgcatatgatatgaagtatcttgaatgtaaaaatgatgatcctgttttatgtattcagcaaaaggcattccttaaagacggacgaccttttgaaatttctgagtcacgtaatcgctatgaccgtggtgatttaacagttaatggcaaataagtgttacttgattaaaaaaatcaattatggcaaaatggctctcgtaagcgtttccaattacatacaagaaagtgaggaaaaatttaatgtattcagcaaaaatgcctaaaaactttttatggggtggtgcagttgctgcccaccaacttgaaggtgcttggaaagaaggaggaaaaggtacttctgttgctgatgtaatgaccgttggttcagctactaggccacgtgaaattactgacggtgttcttgaaggcaaaaattatcctaatcactcagccattgatttttatcatcactacaaagaagatattaaattaatggctgaaatgggcttcaaggcttttagaacttcaattgcctggacaagaatctttcctaatggtgatgaagccgaacctaacgaggagggtttaaagttctatgacgacttattcgatacttgtcatgaatacggcattgaacccgttattaccctctcccactttgaaatgccttttaatttagctaaaaactatggtggttttaccaaccgaaaagtaatcgatttcttcgttcgttttgcagaagtttgcttcaaacgctacaagaataaagttaagtactggatgacctttaacgaaattgataatcagtctgcattcaataatgatttcttgatggctactaactcaggcattttgttcaaagatggcatgactgacagagataaagaagccgccatgtatcaagcaggtcactatgaattggttgcttcagccttagctgttaagattggtcacaagattaatcctgatttccaaatcggttgtatgattaactactcacctgtacgtccgctcactccatcaagtgatgatgtccttttagctgataaatgggagcaacgccgtgactggttctcagatgtacatgtttttggtgaatatccaaatgcagttgaagcctacattgaacgaaatggctatcgtcctgatataactgatgaagataaaattgtcctaaaggaaggcaccgttgactacgttggcttctcctactatcagactactaccgtttctagcgaaaaagttaaacctgatgaattaactgatttggctaaagctgttgctaagaatccaaccttaaagcgtagcgattggggctgggaaattgacccagaaggcttaagaattgcattaaatcaattgcaagaccgttaccacaaaccattattcatcgttgaaaatggtcttggagcttacgataaagttgaaactgatgggtcaattcacgatgactacagaattgactacttaagaaaccatatttcagaaatggaaaaggcagttgaactcgatggagttaacttaatgggctacttaccatggggctgtattgaccttgtttctgcaggtactggtcaaatagataagcgctacggctttatctacgttgataaaaacgatgctggtgaaggtacattggctcgttcacgtaaggactcattcttctggtacaagaaagttatcgaatctaacggtcaagacttagattaattaaactattaatagcaaaaaactgatattcagactttaatcattgaatatcagttttttattttataaatatttactgccttctttaatactcatttagctaaatgctctcgatgcagttcaatgaagttacgcacccaatctggattggtcttagagtaatcacgcaaagcccagccaattgccttattgataaaaaactcctgactatcaagattattttcaataattttttgtaataacgcggtgttcatcttctttttacgcaataattgatgctcaatcgcgacccttcttacccagaaatctggatcgtgcgaccacttgagcattagatcgtctactcgattatccgttaagccaacatagccataaattttgattaatgagtcaatcgtatcccaccattgctttgttctaacaaaacgctcaattttagctaaatcatcaaaaacaatatactttttcattgccaataaataatcacaggcaaaatattgcaattcgcgttgttcttcatcccatgcctggtctagcaacttccagtcaacttcttttttcttcttttcatctttcaaaaaattatgataaatcgccctacgttctggtgtttgtaggccatagaatagaaattgatttcgcatgtaaccaacaagatgattggccttttcttcatttgctcgagcgctaaattctttttttaatgtttcaatattcatgttttttattttagcacaaaaagaggtcccaaattctagagacgcttatcgtaaaaataatcatctacccgatcatttcaactaaaagcttggtagaataaaagtatctatattaagaaaggcataaacaatgaaacaaatttattttaaccatgatggtaatatcgatgatttagtatcttatctgctcttactacaagcaccagatatcaaacttttaggtgttggtgcaattgatgcagacggctacattgatcctagtgttgaagcatgtcgcaaaatgaccgatctttttaacttacgtggtgatgatttgactattgctcgttccaactcacgtgcagtcaaccaatttcctcacgagtggcggatggcaacttattcatttaattatcttcccatgctcaatgaaagtggcaagattgatacgcagcaggcaaagcttcctgctcatttagacatggtcgaaaaaattaaagaagcagacgagcctatcgctttagttatgacaggtccgttaactgacctggctcgcgctttagatgtcgatcccgacattgagaaaaacattgaaaaactttattggatgggtggttctcttgatgggcacggcaacgttgctatggttaacgctgacggtagtcaagaatggaactcgttttgggatccatacgcagttaaacgcgtatttgaatcaaatattccaattcagatggtcggattagaaagtacggaagaattaccacttaacgatgagttgcgccagcactgggcaagtttacgcaaatatcctgcaatggacttgataggacaaggctatagtctaatcgtatctataccatcagccgaactctacctttgggatgtgctaactacaatcagcgcactatatccagaagttgttgaaaccgaaacggctaaagcaagagtcatcactgatgggttaagtgcaggaagctttgtacgggatcctaaaggaagagaagtaactcttgttactaaagccaataaggatctcttcttccaaaagatggatgaaattttagaaagaaaataacaaaaaaagaggctcacgcctcttttttatattgccttaattgactttttgtaaagaattaccgcaatccaaactgaaatgaatgatggcagtatcgcaactacaaacaaatttggatctaaaaaattacctactctgatgaagtttgtaattgaagtaatatgttttatgttactaaatatcgcttgataaactgtaacatatattaacgaccactgaatataatattctaccaaagtgagtgtagttgtcgaaaacttaaaaattttgctagccagtcgcatcccccaataaacaaaaacacctgaaagtacaacaaatgctgctaacagcaaaaacaagtttcccaaattaacatggtcccattgactcatgatcaaatacgcaattaccatgaaaattaagaaattaattgttgaacaacacagctgaatgacaaataaaattgcagcctttaagaattcaaacttgtgctctgatctgaataacaaaaatactactagaataattgcagcaacgatgaaatatgtattaacgtgcacagttatctcctactttgcctgttttaaggcttcgcttgtagcctctttaaccccattggaagtaaatgttgcaccagtaacagcgtcgatatcagcagattgtttatccaaaatttcctgctttaatgttttttctgctttttgaccatactgcggcgtttccgtagataaatctaaatctacagttgaaattttattatcagctacagttaatgtcacacctacaaagcctgccatgccgcgtgcacgggcactatatgttccttcttttaacatcctttttcctcttttttataaaacaaaacattctaagctaaatagtgaattagttatccgacgggataattgattcactatttttattcttttgtagaattaaagtagtagtaaaacgatatgccctgaggtctttagacacttgatgtcgtatacaaaactggcagttttacttaagttttcaatagtctcttcgaagaatgtggacactagatgtcgagtttagaaaattagatctgatttcttaagtaaatacgttttactactaagttttggaggtttttattatgcaagttacttttggaattgatgtaagcaagtctacttctactgtttgtgaactaattggtgaaagcaaaaatgaactaaccattactaataatcgtcctggttttattcaattgcttcatgaattaaccgctttttctaaacatccgcaaattatttttgaagctaccggtgtttattcacgtacactgcaatcttttctggaagactatggctatgattatgtaattcttaatcctcttaaagctaaaaaagaaatggatatgggactacgtcataataagactgataaaactgatgcttatcatttagccttaattcaaagactatatcatcatccaattaatcaacttcaatctcaaacttataagcagcttaatgctttgagccgcttctatgaccagttaacagctgacttagtaatggctaaaaatcgacttcaccaagctctacaatcgacttttcctgaaattgaaaatctattttcttctgctaaaggtaaaaattactggcaaatagttgtgcgatatcctcattgtgacttagtaagaagagaagataaaaaacagcttattaactggttaatgagcttaaaggggattgcttttaaacacgctctaaggactgcagataaattaattgaattagcttatcaagcttatccagttgtatcttgctctagcatagaagtcgagcaagtgcagtattatgcacacagattgcttaatttaagtgatcaaagagaaaatttaatcgcaagaatggttaagttagcgaagtctttgcctaatcatgatttagaaaacctagaaagcattccaggctttgcacagaccactgctgtcagagttttagcagagttaggagatttacgcagatttagtaatcctaataaaatcaatgcttttatcggaattgatccaggcagatatcagtcaggagaaatggactctaatttaagtattactaaacatggcaatgcagtcgcacgtaagttgctttatcgagctattggacaaattgataatgcagctaagacaaatccgtgtcatatagcagattattatgaaagcaaaaagctatcctctcaaaccaaagggttcaaaaagatagctattgcttcaattcataaactaatcagaaccatttatgctctgattatcaatgatcaactatatgattacaacgtagccacacataaccaaaaagactttagttgtaattaattgatcaagtacattataacgctaagcccataaattaaatatagaggtgggcttatttagtatgctttctaaaaaaataaatcgccactaaaagatactcatgacaaaatttaggtaaaaaataaagccaaacaccttattgcgcttgactttacgtagaaaaatactgctatataataaatataacagtattcctaaaaaaagccacaaagatattgtgtttagtatatcatattgatatactatctcttgggtcttgattgtttttataagcccttattatgacccaagtgcaggtagtagaatccccttctacctgttttattataccacaataaataactgatgttatataaaatcttaagttcttttgaaaattttctcaaaagggcttttttcttgcactatcctttctaagttacgttaaaattgaaatggaattataaagttatatttaaagaaggtaaagcatgtatccagataataatattcttacatatttaaaatggcgtggtgacgttgacttctcaacatcgccttttaatgatattgatgcacttgttttatctattttttcttatcttgaattaccaggtattgttaaaagtaacggaacgacaattagtttagagaaggctgccaagctctattttgcagatgatcatcctcgttatgataatttgcaataccaagaactatttaaattaatggctcatgcagaccgctttaaaaatgcaaaactgtcgtattttattagtaccttaactgaacatactcaatttagtgcaatcaaaattgaactaactgatgggaccaactttattgcttttcgtgggactgacgattcactaattggctggaaagaagattttgaaattagttttaaaatcactgtagcccaacaacaagcagtaaaattgctcgaaactattctcaaagctgatgatcaagattattacttaggcggtcactcaaaaggtggcaatttagctgaatatgctgccattaatattgagcccaaattaagaaaaagaatcaaacgtatttatacctttgattcacctggaattgcagaagaagttggtgctcagctccctaataagtatttgcaaaatactctacgccgctttgtgccagactttagcgtcatcggtcgcttgtttgagtcgaaaaatattccagccactattgttggtagtactcgcaagggactaagccaacacgatgctttttcctggcaaataatcggttctaacttcgacaccagacgccaccgcaatgctcaatctcaagtatataatcaactaatcaatcaatggattggtaacgccaccctagaagaacgtgagtctttaactaatgacctcttctctgctttaagctctagcggcgcaactaagatcaacgaacttgataaaaatggttttggcggttttggtgcaattttgttttcactggctgattcatctcggcgaacccgtttcgtctttggttcattattttccagcatttggcagacgatcaagagccagcaactgaccaaagcgcttttctcaacagacacaattgttggttgggtgctggtagtattcggaatcattagtctaactctaccccaatatgcagtgcgagcttttggcgccctagttgccttcacggggattggtttcagtgttcaccaaattttaacaacggcaaaatctagtctaaaagaccgacaaaaaaacttctttattatttcgtatttagtagtttttgctttatcaaccgcgttaatttctaataaccgtctactaattttcttagctcactacttcttaggactattcttaattatctattcctacattcgaattaggcaactagtctttcgtaaattacccggaatttttcagattactattgtagcgatcgaggcattaattgcttttgctttaggaattatcgtagtggttaaccctagtgcctttaatcggagagcaattattattatcggtattttgctaattgcttacggcttcttcaagttagttggcgaattatttggccagcgcagcaaaatgcccaaaaatcatcgttaaaaaaagcttgttaacttcaatatcagttaacaagcttttttcttagcccttaataaaggtattagcctttatatgctttaaaatgttatacccgattgcacgaatatgatttttactaccataagtttgattcaaaaacattacaattccattctgattatcagtagtcagttgcatccagttaacaaagtgggtatcaccaaaattgccataagcgacttttaaagtttgattctttttcagataaaaaccacctgagtaagtattaaccttagaacttaaatgaccaagataatggaactgttttttagtcagaatcttgccattttgcataccagattggattttataataatcattagccgttgaaaatagattcccagcaccaggcaattgagaaacaacattacgattagcataggtactagcattgtaatttttaccaccagaataaagatatgaaatcgcatcagtctttgaccgcggaatttgttgataaatataggtttgcttcaacttcaatgatcgaataacccgctgtttcacattagcagcataagactttcccgttactttactgataatgcctgccagcaaaacatagttagcattattgtaattaaatttactgcgtcccgtattttctcgtgcattggcttgggcaattgtccaattgatcgcgccattttcagaaaaattaactccatgattagattctgttccaattacgttaattcctgaggtatgtgtcattaactgccccaccgtaatttggtttgcatgcttcaaatttggataccagcgtgaaatcttagtattctgattgaatttcttctggtagattaactgtgtaattattgcagcagtaaccatcttttgcaaagaaccaactggataaagcaattttgtattgccatttttcagtcgtttgctgtaataaccgtagcctaagctaacacgttgagcatgcccattttttacaatttcaatgcttcctcgtaaatgatgctttttcatcatcttaagcgtatattgccgtagttgcttatttgaataactcttcgcctgcacagcatgatttgacattatcaaacacgatgaacaaaataaaatgaaagctatcccgaacttttttagtgtcttcaaaatttcaatctccttttaatcctgaactattctaccacaatcaaaaagcgcaaaatcacttttaatcatggtttgcgctttcatttttatttttttaaatttttatagtaagttcatcttaactaggtattccgcattttcaaccgtattccatgcagcacccttaagcaaattatcggctacaatccacatgttgaaggcacccttattttcataatcagggcgaatgcggccaacaaaagtttctcgcttacctgttgcattaattggttgcggataaatttgatgtttaatatcatcttccaaaacattacctggaaaggcagcaactgcatctttaatatcttgtgccgttgcagtctcatcttcaacagtaaagtagacactttccccatgagaaattgacacaggaaccctaacacaagttgcagttaccttgatatctttggcattcatgtcatttagcatgatcttctttgtttcatgaatcatcttccattcttcatgagaatagccactatcttctaaaacatcaatttgaggtaacaaattaaaggctaatgggtaatgctttttgtctcctttagtaggtaaaatatgagcatctgcttgcatgtctttaccatcaaggtaatcttgactttccttttttaattcatcaattgctgcttgccctgctcctgaagcagcttgataagtggaaacgataatttgtttcaaaccaaattttcttcgaactggttccaaagccattaccatttgaattgttgaacaatttggattggcaatgatgccgtgatgctttttcaatgcttctggattaacttcaggtacaaccagtggtacatctggttccattctaaatgctgatgtattatcaacacagacagcaccacgcttaacggcttccggcagaaacttctttgacactgcaccaccagctgaggaaagtactaaatctacaccatcaaatgatcctggtgtagtttcttcaactgtcaaatcttgatccttaaattttaaaactgtacctgctgaacgtgaggatgcgagtagctttaagcttttaactggaatcgttgattgttccaattgttcgatcattcttcttcccacggcaccagtagcacctagaattgcaacattatattctttcaccattatttttttcctcgcaaaaaattcttcattctttccatcgcttcatgtagattttcatcactggaagcatatgacattctaacgtacccttctccaccaggaccaaaagcactacctggagtaataccgacttttgcttcaaatgctaaatccagtgcaaattgcatatcatttttaccatatttagctggaatcttagcgaaaatataaaatgctccctgtggtttaactgcttgcatccccatcttagctaattcatccaacacaaaatcgcgccttctttgatatattttgcggtatttttctggatcatccaatccatgctccaaagcttcagtcgctgcagcttgagaagagtcagttgtagtcgtaaccattaaaccatggactttaccaatttgttccataatttttgccggaccagctacataacccagtcggtatcctgtcattgcatgtgacttagataatccagaaatataaattgcccgttcaggaatcacacttgcaattgaaaaatgcttaacgccataagttaaagtactgtaaatttcatcagtaattacgtacagattgtgtgcttttatcacttcagctaatgccctaatttcgctttcggtgtattcaactcctgtcggattaactgggtagtttaagataaccgccttgatattagattcttccttaagtgtactttctaatctttctggcgttaatttaaagttatcttctgacgtgttcattaatacataatctgcatctgctaaagttgcaactggccaatatagtgaaaataccggtgtaggaatagcaaccttatcaccccgattggtaattgaaaatagtgtcgcattaattgcttcagttgcgccaactgtaaccacaatttcagtttctggatcgtaaactactccacttgcttttttcaaataattgctaattgcttgcctaagttccaattttcccttttgtggcgcatagtgtgaatcattatttcgaatactttcaattgcagctgttttaacatgctcaggtgtattcatatcaggctcacccaaagtcagcttgataattccaggaatggttgaaactttattatcaaaaatcctaatccccgaagccttaacagattgaatcttcttacttaaagctaagtcatttgctaattctggcataatttttcctcttataaaatattctctaagccaataactagttcagttaattgatctactttttctaaagcaactttaaccccactcataaaggaatcacgatcaaatgaatcctgtctaatggttaaagcttcgccaggtccaccaaataaaacttgctcatgtgcaatatagccaggtaagcgtactgaatggattttaattccttgataatctccaccgcgaacattggctaaagtctcagtttcatcaggcgcagtttgatgttcaggacgattttgcgcgatcatttttgcagtagctaaagcagtgcctgaaggtgcatcttttttatctgcatgatgcatttcaataatttcaacatcagggaaatacttagcagcttcttcagcaaacttcattaataaaactgccgacattccaaaattaggtgcgattaagccacctaatttttcctttttggctagttcaatcaaagttgcttcttgatcatcactcaagccagtagttcccacaataggtttaatttgatgcgttaaagcaaaataaacattgtcatagacagctgcgggagtagtaaaatcaatccaaatatctgcagcatggtcaggaatttgacttaattggttaaaaatttgggctgttttaggtaaatgatatctttcaggctcatttactgcctttggagcaaatccagccaccaattcaaaattgggcagctgattaactaaactaacagccttttgccccattgcgccagtaaacccagctattagtacttttttaggcatctcgtcttaccaatcctttcctaaattaagtggcaacttttgcatcaatgcattagcatttaaacctaaatgctgggccaacttttctttttcctcatcacctaaagcgactaatggcaaacgacatccccctactataaatccttgagcattcaaggctgccttaacaggagctggtgaaggatacataaacaaagcctgcattttcggcgttaaccagcgttgaatcgtgcccgcttcaggataatttccttcataaagatcatcaaacattcgccgcatttgtttgcaatataaatggctagctacggaaataacgccattggctcctagtaatcttgcaggtaacgcttgcgtatcttcaccactaaataccaaaaaattaggatctttatgatcaataatgtattccatttcttctaaagatgcacattgtttgattcccttaatatttttaaggcgtgataattggactaccgtttctttttccatttttacgccagttctaccgggaatgttataaatcataattggcattttagtctgagcattaacagcactaaaatgtgcaatcatgctacgctgatcaggcttattgtacggtggcactactactaaggcataatcaattcctttaatctgtgctacctcattggtgaaggcgatagtggttgcagtgtcgttactgcccgttcctgcaataaccggaacacgtccattaacaatttgaccaaaatgctggtacaagtctatcttttcatcatgagtcagagttggcgtttctccggtcgtaccaccaactacaaagccattgcaaccttggtcaattaaataattaaccagcttttctaaactggcaaaatctattttttgattctcatcaaatggcgtaacaatcgccgttaacaaatctgcatcaattaatgttgccattttattgcctcattctattaatcaaaaatcctttgattgcatcaacgccgcgctgaatgcttttctcatcaggattaagtgtagccgtatgcaattgtgaatcaggattaccaacacctagccaaaacattgttccagggaatttagtcagcaaaaagccaaaatcttcacccgtcatttttggttcagtagtaataaagttaaccgtcggctggcttttcatatatgaaataaagttcttggttaattgtggtttattttctactggccaatatccaccttgattcaagtctaacttcacttctacaccaaagcttttctcaataccaagacagatttctttgagacgttgatcgattgtcaaaatcatattttgagttaagccacgaatcgtgccctcaattctagcttgaccagcaattacatttctaatcgtaccagcttcgattttgcctagagtaataacaccactttgaattggatctatgcttcgtgaaataatagtttgaacctgcatgatcaaacttgctgctgcaactaccgtatcatttgcatcttgcggaaaagctgcgtgtccacttttacctagaatatcaatattgacttcagttgtaccagcaaaaagtgtacccatccgacacccaatgctaccagcaggcaaagcggggttatcatgcaagccatagaactcgtcaggtttaaattgatcatgaaaaattcttttttcataagcttgcatcccaccactttggctttcctcggctggctgaaagaaaaaaagcaaattatcttgtggctgattttcactaaaatagcttaacaaacctaatgccacggtcatatgaatatcatgtccacatgcatgcattactccctcatgttttgatgaaaatgccagtccagttttttcagtaactggtaaagcatcgatatcagcacgatatcctatcgttctgtgtggttttcttcctttaactaatactagaattgcggtaggcagtgtcgacggtatctcaacttccaaataatcttgcttaaatttttgaattacctcgattaaataatcatgtgtttctttttctgctagtgctaattcaggtatttgatgtaaatgccttctaatttgaattaactcactttcacttaaaactgacattttataactttctcagattatcttctagttccgtcttactactagttttttcatcaacttttttaataattttagcaggaacgcccgctaccatcgtatgtgctggcacatcatgagtaactactgctccggctgcaataacggctccttcacctacatgaacaccctcaatcacaacagcattagccccaatcatgacattatcatcaatttgaaccggtttagctgaagcaggctcaattacaccagccaatacgctaccagctccaatatgacaatgttgtccaacaatggcacggccaccgagaactacgcccatatcaatcatggtattagccccgatttctgctccaatattaataatggcacccatcataattactgcattattaccgattaccacttgatcacgaataatagctcctggttcaattcgagcattaacttttttgaagtccaataaaggaactgctgaatttcgtgcatcattttcaatatggtaggccgtaatttgatgattttcttttaaaaatggttcaatatctttccagtcaccaaagatcgcgccagaatgagcttcagtaaaattctcaatttcctttggaaaatcaatttgtgctaaatctcctttaataaagacttttaccggtgtcttttttggtgcattaccaatgtaatcaataatactttttgcatctaactttgccatcttttttctcttttctaatttaaatatgattgatctaaatgaaccaagtcttctaaactttcacgcttaatgactaattttgctttaccattttctgcaaataccactgctggtcgaggattacgattataatttgaagccattgaatacccatatgcacctgtatccaacatcgctaacaagtctccagctttgacttgtggcaaagcttgatcttctgctaatatatcgccactctcgcaatacttaccagcaatacgaacatgttcagtcaaaggcgcttgtggatcggtggctaaaactgtttcatacttagcctgataaagtgcagggcgaatattatctcccatcccgccatcgacagtaatataagaacgataacctggaatatccttacggctacccaccgtataaaggttgtaaccggctggaccaacaattgatcttcccggttcaatatcgatttcaggtaaaggataattcattttttcagcttcagttttgatcaccttaacaatcgtcttaacaaattcttctggtcgtaatggatgatcttcttgggtatatttaatcccaaaaccgccaccaacattaataacttgtgcaagatagccatacttttctcgccaatcttgcgctactaccattaatttttgtgctcccatttcaaagccgtttaaggcaaaaatctgtgagccaatgtgagcatgaatccccaacattttcatcctaggattagctagaacttgttttaatgccttttctgcttgacctgattcaagatcaaagccaaatttactatcaatctgacctgtttgatcatattcatgggtatgtgctgaaatccctggtgcaatacgcaacatgacactaatcgtagcatcgtacttttttaaaacttgcgccaataactgaatctcatgaaaattatcaataataattttgccaacatgattttttacagccatttccaattcagttaatgatttattattaccatgaaagctaactctctccattggaaaattggcttttattgcagtaaataactcacctgctgaaactacgtcagtgtatgctccctcttctgcaataacttgatacattgcgattgctgcgaaagctttacttgcataactaacagcataggccatgttttcttcttcaaaaactttcttaaaagcccgaatttgtcgacgaatttgatcgacatcataaactactaatggcgtaccatacttttgagctaattctactatatcaactccaccaatcgttaaatggccttgctcattaatctgatctactgcaatttgtgaattcattttgttctcctgtctttttcaggcgaaacgctaataaaaaatccattgtctgcgccaaacaaacaatggattaatttctacttaatctatggtcgatagcgctccgcgaattttgttcgcgacagtccgcagtttattcaactacgccccagctcaagcctttagcatgactcagcttcggcaacctccccttttacaattcatcttcgttttgcccaactcagaattgttacttatgtcggctgcgcctcttcgattgactgtagtttacaattttataaaaacatagtcaacaaatttattataaaaatttaattttatttgtaacaatgcggcatttagagtgataaattacagtcatcacttgcaagattaaaaaataatgttagaattcaattaaatttagtctgacttttttatttaaattaatgatttctgaaaacaaaaggagttttgaaatgaaaatcgtaaagtttggtggctcttctttagctaccggtgaaagtgttgcacaagcaattcaaattattctcagcgatcctcaacgacaagtaatggttgtctctgccccaggcaaaaggaatacaacagatatcaaagttactgatctgttaatcaagtacgcagatttagccttaaagcacaagaattgtgttgaaatcgtgaataaaatttttagtcgctatcaagaaattggtcattattttggcttagctgatacggaattaagtattattaaacaaattttattagagttgcccaatcagggttatcctaacgaaaaatatcttttagctgcatttaaggcacatggtgaacggcttaatgctcgtttaattactttaattttacgccatcaaggaattaatagtcgttttcttgatccggctgaagccggtttaatcgtgactggcgagcccaatgatgccattgtcaatccagagagctacttaaatcttgaccaaattaaaattaaggctgatgaacgtatcgtatttcctggcttttttggcatgactccgtctggtaatatcgccactttttcccgtggcgggtcagacattaccggggctattctagctcgcggctttcatgctgatctctatgaaaattttacagatgtcaatgggatttttgccgctaatcctcatattattgagcatccccaatccatcaagaaaatgacttatcgcgaaatgcgagagttgtcatatgctggcttttctgtttttcacgatgaagcattgattcctgctattcaaggacagattcctatcaatgtgaaaaatactcatgatcctagcaatcctggcactatgattgtcccagaaaaggattttgtcccagataatgcaataaccggcgtaaccagccaaaaacatttttccgcattatatttgcataaatatttgctcaataaagaagctggtttcaccttacgtatattacaaattttataccaacataatattccatatgagcatatgccatctgggattgacgatattaccattatttttaacaatgattttctaaacgatcagttaattgatcaaatttgtaatgaaattcaagctacaattaatccagatcaactcgaatggattgaagattatgcaattattatggttgtcggcgaaggaatgcgacaaaaacataccatcagccgtcaaattatcgattctttaggcgatcatgatatttcaccacaaatgatcaatcagggagcttctcaaatttcaatcatgatcggtactaaaaaagaaaaggctgatgaagcagtaaaaattatttatcaaaagttttttaattagggggcattatgattaatttattcaaagttcacggttcgcaaaatcatttctttattcttgatcaaacacaattcgaacacgaattaagtgacgccgagctaaaaaattttacgcaaaagattaccaatccacaaactggactgcttcacggagcagatggcgttttagtagttaatcatcccgtgcattctaactcacttggccagatgcgtgtaatcaatgctgatggaagtgaagcatcaatgtgtggcaacggtctacgcaccgttgctcgttacctaagtgaaaaaacgggaaaagataatttcctagttgacacaatgaatgccagcttacgtgttagaagagaaaaagattttgcttctaacgtgccagcatttgcagttgagatctctcctgtacgctttaataaagaggcactcccttttgataatttaggacaagaacggattattgatgcttggttgccagaaatttatcctggattacgttttacttcaattgccgtacctaacccacatttaatttcttttgttaatcaagcagaaattaccggcccgatcttaggcattgttggtaaaaaattaaatagcaataatccctactttacagatggcgtcaatgttaatttcgcgcaaattttagataaaaataaactttttgtccgcacttacgaacggggcgttggttttaccaatgcctgtggtactggaatgtccgcgacttctcttgctcttactttaacccaccccgaaataggcaacttaaatacaccaatatcagtttataatcctggcggtatggttaaaactatcgtgcattatgaaaaaaatagttattggatcgagcttattggtaacgctacttttactcatcgaattaagctttctgaagctgacttaaggaaaggtgatttttccaatgtccagatccaaaagactgctgaacaaagtgcttatgaaaaatttattgctaatctgccaaagttcaatgacattacaactttagcgtaaaaaaatggcttgcaacacgcaagccatttttactttttaattattaatctaagtctttcaagccatgctttttcttggaaacgcgataagctactaaaccaaagaaaattggaccaaagcttgtccaaaaagcagttgcatatctatgctccaaaactggttgcaaaaccgtaaatataattccggtgcaaacaatcagctcaacaaagactactaacgcaaccgtccatttatagttagtaaacactctaaacttgcgcggataatcttttttaagaaagaatggaaatgcaccgatcaagaaaatataaggtgcagtagcggctacgttacccatatccgtcagaatttgataaaagctagtcgctgcgctaccaccgaatgagaccaccgcaattaataggcaaacgaagacagtttgagcccacatcgcattagcaggaataccgtgtttatttaatttagtcgctgccttaggccataaacgtggatcagatcccatgatgaaggatttaattggtgaataaagcaaaacaaagagagcacctgtcattcccatcaaaccagataaagcaattgctctagtaaagaatttaccaatcaataaactcgtgttaggatccaaatgaagtgcggttccaaaggctttgccaagtgtgccatatacggtatacgtaatatttccagtattggcattggctgctaaaatatctttttgataattaactgaaaagccggtcataaaaatcatcaaaacataagaaataatagtgaacaatgacccaataattaagcctttagggaaatctttttctgggtgtttcatactgtcaatcacaccaccgacggtttccatcccaccatatgcaaagactgcataaactacgaaagaaataatcgtaattggcgtttgaaaacttttattaggcgaaataataaaactttgccacccagtaatcggctgagccaattgcccatgattcataatcaagaccgttaaactagctagaataaagactgcattcattacaatcatgaaccaaccaccgattgatgacataattttaattccagttatccctctggaagacaggtacgttgatacaatcatgaataaaattgctagtacacctatcaattgagtaccatgcaagcccaaaatattccattcttgagttgtatctttgccaaaaataagggcagagattgaaatccaaagccttgaggcgcttgcaaccagccacagcacccagttagccagccatacaaaagtcccaataaaggcctatttttgtccaactgagccagctaaccatgaataaataccaccttgagcatcatgaaaagcagacccatattctgccatcattaagccagctgggaaaaagaaacagacgccagccaaaataaaccaaatgatcccagcatatgtcatttgctcataagaaacagaaacattgccaaaaccataaaccgttgtgataatcatcaacacaaggctcatagtcgtcaatgattttttagtttgtgaattttcatcatccaagataaagcctctactttctatttacactttccattttagcatcgtttatcttgaataaatttattctaattttaggctcataagaaaaaactactagttattcactagtagcccttcatttttattcattaattcttttttcaatccaattacttaattcagttacatgtaatttagtgaccgaactaaaagtcaaaacggtgacatgatcatagttgagattcaactttttctttaagcctgacatcaccttattagtttgactcttttttattttatccatcttggtacaaactaccaaaattgggatatttagatattgagcataatcatacatagcaatatcatctttggttggttcatgacgactatctactaagataattagtccctttaggttgggtctagtttctaaataatcttgaatcatttcgccaaattcttgccgcttcttctgtgaaactttggcatagccataacctggtacatcaaccaaataaaatttttcattgactttgtagaaattcaaagtttgtgtctttccaggctgtgacgaggtcctagctaagtttttacgctttaatagggtatttatcaagctggactttcccacgtttgagcggcctgctaatgcgatctcaggcaagttatctttaggatattgatcttctctaacagcactaactgcataactactgctttcaatgatcattgacacttacctgttctttattatcagtatttttgcggattacctttggcttagcgtgcttagtaattacgtccttagttacttcaacggtctcaatatcctcttcactaggagtttcatacataatatccataattgaattttcgataattgttctaagtccacgtgcacccatatttctttggattgctaagtcagcaattgccttcagagcaccatcagtaaacttcaaattaacatcatcaagtgataacaacttcttatactgcttaactaaagcattctttggttcagttagcactctgaccaaatccttactactcaatttatcaagcgtagtaataattggaattctaccaatgaattcaggaatcattccaaatttaactaagtcagctgtagtcaaatggcgtgtccaatcatctgcattaattttatctgcctcattttcagcaccaaagccaatggtctttttacctaaacgatttttaacgatttgttcaattccgtcgaatgccccaccaacaataaatagaatgttagtcgtgtccatcttaatcatttcttgttgagggtgtttacgcccaccttgaggtggaacagaggcaattgtaccttccaagatctttaataatgattgctgtacaccttcacctgaaacatcacgcgtaattgagacattctcagattttttagaaattttatcaatttcatcaatataaataatgccacgctgtgcacgttccaaatcataatcagcattttgtagtaacttaagcaaaatattttcaacgtcttcaccaacataccctgcttcagtcaaggtagttgcatcggcaattgcaaatgggacatttaaaatacgagccaaagtctgagcaagatatgtcttacctgatccagttggtccgatcattgcaatatttgatttttgtaattcagttgaagaatcaacatccatttggctaattctcttatagtgattatatacagcaactgataagacttttttagcacggtcttgaccaataacatattgatcaagttccttttttatttcaacaggcttaggtaattcacgagctgctttaagtgaatctgctcgtaattcatcgtcaataatttttttagccaagtcaacacattcattacaaatatatacaccgttaccggcaatcattttcttaacttggtcttgagttttgccacaaaaagcgcatttaatctcttcttgatctgtaaactgatttgccattatttttcctcctatatctaccaaaaatcagattatcataaattaactaatattgataaatattaagctcgaacagcaaaaaaagcggcctatagccgctctttttgagaaattagcaaatattactattacttgctttccttcttgtcatcgtcttctttgttttcaagctttgacttagcaacttgcttagcattatcagtaataagatccatagccttacgtacagtaatgtcgtggcctaacatgtcatctgataaggtgttacgtaccatcttttcatccatgttgtattctgaagcaagatccttgatttctttatcaatttcttccttagttgccttaaggtcttcagcagcaacaatagcttcaagaactaagttagttttaactctttcagctgcattcttttcaaattgtgaacgcaattgttgttcgttggtattagtcaacttgtagtaagtttgtgggtcaataccttgacgttgcatattacccaagtattggttcaattgagtatcaacatcttcttgaatcatagcatcaggaatttcatcgatagtagcgttgcttacagcaccttcaattgcagcttcttgaatagcgtcgtttgcttgttgttccttttgttccttcaagtccttcttgatcttttcctttaagtcatcaagggtgtctacagagtcatcaacgtccttagcaaattcatcgtctaacttaggaagttgctttgacttaacttcgtgaatcttagttgcaaagtgtgcttctttaccagctaaatcctttgcaccgtaatcttcagggaaagttacaactacatcaacatcatcgccggcttcatggccttcaagttgatcttcaaagccaggaataaatgcacctgaacctaattcaagtgagtagttttcagctgagccgccttcgaatggcttgtcgtcgatagtacccttgtaatcgatagtaacagtatcgcccttttcagccttacccttcttaagaacaagttctgcattttgttcacggcgcttgtcaagttcagcatcaatgtccttttggtaaacacgagtgttttgcttaagaacttcgatacccttgtagtcacctaacttaacttctggttctacagtaacagtagccttcatagtccaatccttgtccttatccattgatacaggaacaatttgtggttggccaactgctttaatacctgcttctttaacagcagcagaatatgcatttggtaatacaatatttaaggcatcttcatataatgcttcttcaccgtaatattgatcaaagatcacacgtgatacgtgaccctttctaaagccaggaacacgcaagtttttctttactcttctaaaagcttggtctaaacctaatttaatttcatcttgtgaaatatcaaaagtaagatcaccggttgtcttaccggtcttttcccatttaacagacattaattaaatacctccaatgtcaaatttgagtttgcatcttgcatactaagttatcttaccttaaaaggccgcaaaaaacaaatttaaaagaaaaaagatgcgctcctgtgaagaagtgcatctttttttaactatatcgttagaaattagtcaaggatttcagtaacctgaccggcaccaacggtacgaccaccttcacggatggtgaacttagtacccttttcgatggcagctggcttgattaacttaacagtaaattcagtgttatcaccaggcataaccatttcagtaccttctggcaattcaatttcaccagtaatatcagtggtgtggaagtagaattgtggacggtagtctgagaagaatggggtgtgacggccgccttcttccttcttcaagatataaacttgacccttgaattccttgtgggtttgaattgagcctggagcagccaatacttgaccacgaacaacttggtcacggtcaataccacgaagcaatacaccaacgttatcgccggcttcacctaagtcaagagtcttgtggaacatttccaaaccagtaacaactgacttaagaaccttgtctaccaaaccaacgatttcaacttcgtcaccgaccttaacagtaccacggtcaatacgacctgaagcaacagtaccacgaccagtgatagtaaatacgtcttcaactggcattaagaatggcttgtcagtttgacgttctggagttgggatgtattcgtcaacgatgtccatcaacttaagaatttgttcttgagcttccttgtcgccttgtaaagccttcaaagctgaaccacgaacaactggaatatcgtcaccagggtaatcgtattcagtcaacaagtcacgaacttccatttcaactaagtcgatcaattctgggtcgtcaactaaatcacacttgtttaagaaaacaacgatgtagttaacaccaacttgacgagcaagcaaaatgtgttcacgagtttgtggcataggaccatcagttgcagcaacaactaagatagcaccatccatttgtgcagcaccggtaatcatgttcttgatgtagtcggcgtggcctggagcgtccatgtgagcgtagtgacgattttcagtttcgtattctacgtgggcggtattaatagtaataccacgttccttttcttctggtgcagcatcgatttgtgagtaatcttcagccttagccaaacccttgtcagccaaaacagtagtaatagccgcagttaaagtggtcttaccgtggtcaacgtgaccgatagtaccaatgtttacgtgtggcttagttctaacgtaatgttctttttctgccattaaaatgaccctcctgtaaatttgcaagaagtccgttgagataagttaacggataattctctgttgaatattgtactactttcttcggcaaatgcctagtaaaaaagcttaagcgaaattgcctaacgaaaatatcctttgctaattatactaaatagtttgaaaatgtaaaccttttttacttattttttattgcggtaagtatttatatattttttctagtaatttttgatgactacggccatcttttctttgtaaaaatgagactaaatcactagcaaaactgtcaggctcatcaatatattggttaattttagggtaaagactgcctaataccaaattcacttctcccagcattaatggcaactgacttggactattgtgaaatttgcttccaatgctagaaataatttcacggtacttaggttctttttctagaagcagtgtattcgccggaataaagctctccatctggcctattacccaaatttcaaacttttcttcaagtcccaagcgaactaagtcttcacaaagtgacaacctaacagcaaaatctggcgttggatctaataagacgcttcgtgcaaaagctttaaaattaggcaggtttaacttatgtaaactttcataatccgactgagtaacctgttctcgttgtttaaagttttgcataatctgccgctgtttttcttcagaagctggttttaccttttctgataagtccaccccaacaagattttttagttgtagagcttcaataaaaaaattatttttagctagaatttgacagtaacttttaaatactcgctgatcagaaaaaagatcaggctcctctttaattaaagcatatgcctgatcttcttgtttattagcgcaatagagtttgcagagtttcaaaataacgtccaatgaatgctcttcacgtaatgcttcttctagattttgaatagctgcttcgagatctcccttacgctcatcttcttcagcaagtttcaataaattttgttggcttactgatgtcatttttagtctttcttattactttcttttttcttatttatttttttattttcgtctttggcatggttcttattgtcattttgtgctttttcattgcgtttctgcatagcacgatgacggttttgatttacttccatgaccacgggcaagatcactggacgacggttagttttcttgtataaaaacttctccaaatcaccgcggatatcttgcttcaattcagtccaatcaaactttttgtgttcaaaattggcctgaattgcttttttaattacatcaattgaatcactcatcaactggcgattagccttgatatagacgaaaccacgactagtgacttttggctctgcaataatctttttcttcttacggtcaattgtaacaaccgcaataaagattccgtcatctgataggacctcacgatcacgtagcacaatattaccaacatcaccaacaccagaaccgtcgatcatggtatcttcacctggtactgggtcagttaagaagaaacgcttctgcttaaagtcatattcaagacagtcaccattcttggtaatataaatatctttaggattcattccagctttaatagccaaatcacgtactacttcaagtaaacgatattcaccaattactggaattaagaattttggcttcaaggttgtaatcaaaagttgcagatcacgaccagttgcatgcccactagtatgtatatttctgcctaactggataaccgtaccgccagccttatataccaaatcactggtttcagctaccatcgtttcaaccgcatgtgacggagtagttgcaataaagaccaaatcgcccttatgaatcgtaatcatactatgacgcttcttagccattttttgtaatgagttaagtggttcacccatacgcccagtctctaatataactgtctgctcatctggcacagtcttcagatccttaactcgcatcaacaagccttcaggcacatctaaatagcctaatttcattgaagttctaacaatcttagctagatcgcggccagttaataagacgcgtttccctgttgctgctgcagcatttaaaacttcttgaacacgattcaagttagaggctttagcagctacgataattctgcctttagcatttctgaagacattagtcacaaatttaccaatatcttgttcagatgcattagggaaagatgcttctgcattagatgaatcacttaaaagcgctaaaacgcccttttgttcaatttcagctaagcgatccatatcagtccgataatttaacgcagctgttggatcaaatttaaagtcaccagtataaacaatttcacctgctggtgtatgtacatctattccaagtgaatcaggaattgagtgtgtcgtatggaagaatgaaatacttgcattcttaaaatcaatttcagtatctgcatcgattacgtggaacaaactattcttacggcgtttgttttcgcgttgtacttcaattttagcaagttcgatactcaattgtgaaccaaatactggaatatcgtatttacgcaaaatgtatggcaatgcaccaattgaatcagcatgcccatgtgttaaaaagatacctgctactcgatctccgtattgttcaaagaaatcaaggtcaggaattactacatcgataccaaataaagaactatcagggtactttaatccggcatcaagaacaaaaatttcatcattaacttgaacggcaaacatgtctttaccttgttcacgcacaccgctcaagatcataattttgatttgatcagccattatatttccttttctatctaatttttaattcttatggatctatcgatctcaacgtaaaaataatctgtttcaattttagcataaagaataaaattatgacagagacaaaaaaagccagccttttcggctagcttcattattcaatattatgtgaaaattaacgacgaagacctaacttcttgatcaattcacggtaacggttaatgtcgttgttttcaaggtaacgaagcaagttacgacggtgaccgatcttcttaagcaaaccaacgtatgagtggtggtcatgcttgtgactcttcatgtgatcagtcaagttgttgatatcagcagtcaaaagagcaacttgaacttcaacagaaccagtgtcaccttcgtgagttgcgtattccttcataatcttttctttttcagtctttgaaattgccatagttaaattcacctttcattaaataattgccgttaacaacgtttatcgtcggcgtgaacaaataaacagcgttagcggttcacaacagtcataatcatacacattattttttaaaaaagcaagcagaaattaccttgcatccgtgatatttcttaagtataatggatgaagtaaatttctaaatcattggaggtgaatttcatgccacaaatcaaatcagctatcaaacgtgttaaggctcaaaatgctactaacgaacgccgcgcttctgaattaagcaagttaagaactgctatcaagaagtttaagaacgctgttgaaagtgatagtaaggaagacgtctccaagttgcatttagaagctgaacgtgctttggataaggctgcttcaaaaggcttaatccacaagaacaaggctgctcgtgacaagagtcgtttaaacaagttagcaaacaagtaaatcttacttattactaataataaaaagaggagatctgcagtgatctcctctttttgtatactcttagacatttaagataaataatttcaaaaaattatcttctcggtaagttccatttttatatttaaattctaagtcgattgcatcccttaataaattttctagcttgtctatcttcaaccgattacgtagggctaacttaaccctatagggatgaacgcctaattcttttacaatttgtggttcgctacgacctctttgtgctaagatcttaacgaccaaaatcaattctaattgattttcaaagaccgctaataattgaattggattagtcccttcacgtaattgattatctaagcgctcaactgcttcacggtaattcttatctaaagccgactccaaaatagcgaaaatattttgtgctagggacaaatctacattttgcattactgatttttcagtaattttgttatcggtagctaccatttttagcttttgataattgcttaaaatagtgtcaattacctgatcactccgctcaattagcagctgtaaagctgactgtgtgattatatatccctcatctttgatcaaggctttagtcgttgaagcaacttcatagggcctaatttgtggctcaaccacattgaattgctttagaacagttttagtcagttttttacgcctatcaattttttcataagaagcaacaattactactacatcttctaaatcagctaagttttcaaaaatcttttgtaagtcatcaatttgtttctgtaattttttagataccttagctgttaaaaagaaaggatttttgactacaataaatttctgttcactaaataaactggattcagttaagctcgcaatcaattcatctaagccatcgctttcgcaatcgacagtcacgtgctccaaatctttaaagcgatcttccttggcatatgatctcaccaagtaatcattgagaaagtcatctgcaccccaaattaaggtatgtggattattgttatttgtatttttaaacaaagaaagtaaggtcattttttatcccgctttaaaaagtaactaaatctaggactttgcagtccgccataataccagctaatcataccacagtcttgcgttgaaacccatggtatttgctgttgagttagtgtcgttagcgtctcttgatgggggtgcccgaacctattttttcgaccagcagaaataaaaacttgcttaggatggattgcacgtaaaaagtctggattggatgatgttttactgccatgatgacccaatttaaaataatctacctgaagtttcatcctctgcataatttccttttcaccatcttgacctaaatctcctgtaaacaaccaattcttattcgctactctaaaaagcaaactcagggaatcttcattctttccttctcctgcttgatatggataaaccacattaaatgtaatctgcggttctttcacccgcattcctgcaagtaactccaataatttggtatcttttacacgaccatctaatctcttttgaaaagatggattcttaattagtccttcggccataaataatttcttaacattaacctgctctagtaatggtcctaaatcaccaacgtgatcggcatcttgatgcgaaacaaagactccatcaattgtattaattccctgacttttcaaaaatggaatagtaattcgatcaatctgaggtgtctgctttttgccactaaagtttagtttcccaccagtatcaattaaatataccttgcgaggaaatggcgtagtcactagaatactatctccttggcccacatcaataaaggttacttgccctcgcaaaggaaaatgaatcatgctgaagaaaattacatacaagctcaacaagcccaccataattttcttactattaaagcgccagttaactttttctcttaaagaaacaattaaaataatcgttactattaatagcaacagacactgccaccaattaatttgcccaaaagttagtagtcccaacttagtagcagataattgcccaatgattttctcacctaattcaagcactttttctaataccggagcaaaatctttagtcagaccaaacgtcacaatattgaaaaaagcaattggtaaaactatccaattgaaatatggcactactaacatattaaaaattacagttaaaaaattgacctgataaaagaaaagcaatagtaatggcgttaataaaatatttaacaaaattgcttgtttaaaactgccaaacttatcagttaactgtaaacccaatgccaaaatatagctcaataaggctccagttgccagaaataaacgcggtactactaaaagatgtaaaatgcaggtcaatcccagcagatctatcgacgcaacatgatatttcttaaacttacaaattttgcctaaaaagtaggttaaactagctcttacaaagccggcttgaccattgcttagaaaaatacctagcaataaaaccaatgtacagcagacaaaagtttcttcatccgtcagtttcaagttaaaacaaaatacactaattaacaagacatagattccaacatgtaagcctgaaatgcttaacaagtgaataacacccaaatctcgataattatttagtatttcttgattttcttgagcattattttcacccaagattaattcactagcgaaaaagcctaataactgtggcatcttggcaaaatagttctgcaattcaaaacgtaattgatgcaattgatccccaaaatcagtaatcgataatagcttcatttgacaactactgtatttcaatttttggtaaatctgttttgcctgataataattctgaaaattaaactcaccaatattagttgctggctcaattgaattgcattccccattaatttctgtcactaaaatagggttcccatgcttaagcagttctttttgaacatctgttaccttgccaccaattaaaattttaccttgagcgaaattacccacacctgttaagtagtcgtctttaattcttacctgatcagggtaaattcttaattggctctgctgggttaaaacaaaattggtttttggtttacttaaaaaaatcagtaatagaaatgctccaactattagactaactatttttaaactaactcgatatttttgtactaacagtagcaaaaagtaacccagaaaaaataaagctactattttttgcaccattgttgtacaagaaaaagccaaaaaagagattgtaattagcaacaaagcggttattaagtaaaagccaacttcatttttaaacagccaattgatctttaaggctcgcaaaagttttttctcctattcctgatacctgcattaaatcttctatctttttaaaagaaccattttgttcacgataagcaataatctgttctgcctttttttgaccaattccagttaacttttgtagttccgttacattagcagtatttaagttgatcttagtgccatccccttgattacttgggctactgctactagtactcccactattttgactattatcagctgatcctgcagttgccacattttcaaccttttcacccttgtaaggaatatgaattttatcttgatccttaagcaaagtagcgcggttaatagcttttaattgtgctctagcagtagtacctccagccgcctcaattaactcctgcagacgagcaccatttttcaatgtatatactccctgatgcttcaccgcaccggaaatatcacaagttacagtcttagaaacggttgttgaactactgctagtcactgcattagtattagtggttgcacctgaactactagtgctagactgcataacttgatcctgcactgcagcagcattttcttgatgatcccctttcttcaatccataaaatccaactacaagaattattgcaccaatgagatatgcttttttctcaagcacaaattcttttactttttcaaaattcataaaaatcacctctactatttattacgcaaaaaaagcccagaattttttctagacttcaaattttttgaatttttttagtagtgtgtctttagatagtttaatgcatcatcaaaagtgctcacagggacaattttcattttggtgtgaattttctttgcggttctcttagcaaccgcataattagtttcacttttcttcacactggttgaatcagtcggcgcaaagaagacctctgcaccttctctgctagcagctaccacttttttatcaacaccaccaatgattcctacttttccggtaggtgaaatcgtacctgttcccgcaatcttatgtcccttacttaagttctgcttggtaaagacctcatagctttcaagtgtaaacatcaatccggctgaggggccaccgatttcgccagcattaatttttaacttaggcttagttttcacaactacatgctcaactaattgaatcccaattcctggcttattagtaccctttactttaacaattttgccagtaaagtgtttctcttgcttaccacgcaaaactgagattgttactcgtgcaccaatcttttgtttacgcaaataatccatcatctcttcagttgagctgaaacgatgcccgtttgcgcctaaaacggtatcaccaatttggagcttatttttaaaactagaatttttctggacttccattacataaacgcctagatattttaagctatgctggttacctgcttttttagctgcataataaattgcattctgctgacttgtttccatataccagttttgcaactcattatattgagcactagtttgacctcctagcagctccttgcttgatacacgctcatcatacggacgagtaaaactccatagatattgcaaaaccggagccggccgactagttatgctaactgtcaccaaataaaaattattcggacgtttatttgatgacttaataaactggcccacgggcattgcctcaccaggatattcaatataataatcggtcggccaaacagcaagtaccactaataaaacaagcgcaattagtgccaagagccaattacgcaagtgctttttcgattgattgtttttcttattattcatgttttagcttctctctcaatgcaatcgctgcttttttaggtaaaaacagactaacatcttcatcaaaacgagctaattccttaatcatgcttgaagctacaaaagaattttctggactcgtaaaaagcaaaactgtattcacatctggagccaattttttattaatcccagcaatctcctgttcatagcggaaatcagcactgttgcgtacaccgcgcaccataactttagcatgcaattcatgtgctaaatttacagttacttcttccggtctttctagcacttcaatattaggtatttcccttagtgcatccctgattagatcagcacgttcttcaggcgtaaacaagtatttcttagctgtattggtcatcgcaactacatatactttatcaaaaatttcagcagcctttttagcggtctccacatgcccattagtaatcggatcaaaactccctggaaataaagcgattgtcattattagtcctttcgataaatcctcacaattgtttttcctaaatggtgttctttgatcaatgaaaaaccagtaatttcacccagttctgtatgatcatcagtttctgctaccacaattgcatgatcattaagtaggttcgactttaccatctgcaacatgtccttagcgattttttctttggcatagggcggatcaagaaaaactagatcaaacttttcatcattctcagaaaataattttaatgctgcagagctgcgcatattataaacattaaaacgctgctcttccttagttaaagcaacatttttcttaataattgtacaagcagcatgattaatatcaaccagactcgcatggtcacagccccttgaaacagcttcaattcctaaggcaccactaccagcatataagtctaaaacattaccaccctgaaaaaattgtcccaatgaattaaaaagggattctttcaccttatcactggttggtcttgtccgattacttttcaaagtaaataaatttcttttagcatatttccctgaaataattctcattttagttgattctcacttttttcttgttcaagttgcaatttcttttctgctttttgggccatctcagctaattgattttcaatatgttggctatccaaatttacttcttcttcagctgaaatttcgacatgattaacaaaatccaaatgagcaatttgtcctttgatttcattgcattcgttgcgattaacataaagaacacaatatttcatttttttagaaaaataaacaatgtcaccaaaatggcgcaacttatattgatcactaactgattttaaataaataatcaatgctacccttttaattaagtgggtactttcaatttctttattgatactcatgcaactgtttcatccttttcctgtaacattttttcatttgctgaaacgttcagtactaaaccaatcgcagcagtcaagacaatcattgatgaaccaccatatgaaataaatggcagcgtaacccccgtaatcggcaacaatcctagtactgcaccgatattaaagaatgcttctgtaaaaataatagtcgtcacgccaaagcaaattaatgcgtcgaattgagaaaccgcgtgaaccccaacttccataatctgccacatcaaataaaagagtaatccaaccaataaaattgtcagaatcacacctacttcttctgctgtaatggataaaataaagtcggtatacggctctggtaagtaacctcgcttttgcatactattacctagtcctacgccaaataatcccccattgtggattgcataataggagttaactagctgggccccacctttttgctctaattcaaagggatgcaagaacgacattagtcgttggaattgataacttctttgtaaaaatccaggattccaggcaactacaataaaaaatacagctgtcactaagatcacaatcccagctaaccaagttaaagctaatttagttggaacccctgatactgaaaacattactaaagtgatcataaataaaattgctgtcccaccaaaatcaggttcaacaataaccaaacacattaaaaaagccgccaaaattgctgggtgtgacaaattatgtttgatcttacccttgactaattttccatctcttctgtctagtacatatgacaaataaatgaccagagccaatttagtaacttctagtggctgcaaattgataaagcccaagttaatccaacctacagcaccattaactgccgcactactgccatgagcaaaacgtagaaatactagccatcctaacataagtatacaaattaataaaaatccccctacaaactttggatttttaaatactttgattcttaatgcaaaaaacggaatcccaaacaaaaagaaagctactatagcatagattgcttgccgtatcccatagacatttggcttaaatccattaactaataaaatatctgaactagctgaatataccaaaattatcccaaccactactaaaataagatagggaataaaaatctggtaattaagataacgtaattttcgacgcacaagcgttgcccctttatctaaataatacttttttcattataaaacaaaaagatcatcacttctatcaagtgacgaccttttaaaatttattaaactatcttagttagcacggttacgcttcttatcagccttttgacgttctgaagtgttcaaaatcttcttacgtaaacgaatagattcgggagttacttcacaatattcatcatcatttaagaattcgatagcttcttcaagagtcaacgttctaggagtcttaatagcagcagcgtggtccttaccggcagcacgagtgttagttaagttcttacccttagttacgttaacagcaatatcacgttcacgtgatgattgtccaacaatcataccttcgtaaacttcaacaccagcaccgatgaataactcaccacgttgttctactgattgaagtgagtaagtagttgattgaccttggttaatggataccaatgcaccattacgacgacctgggttccagttctttactactggcttatatgcttcaaaggtgtggttcatgataccatatccaccagtttgtgacatgaattcattattgtaaccaatcaaaccacgtgatggaactaaaaattcaagacgagtttgaccattaccagttgattccatattcttcatctcaccttttctttgtgaaagtgagtcaataacagaaccaacatattcatctggagtatcgatttgtactgattcaaatggttcgcacatagtaccatcaatttcacggtaaataaccttaggacgtgaaagttgtaattcgaagccttcacgacgaagttcttcaaccaaaattgaaaggtgaagttcaccacgacctgaaacagtccaagcgttcaattgatcagttggttcaaccttcaaagaaacatcggtacgagtttgacgaatcaaacgatcttcaagcttcttaggagttacttgatcaccttcacgacctgcaaatggtgaatcgttggcaacaaagtccatttgaagagttggtggatcaatcttaagaagtggcaatgcttctggatgttcagctgatgcaatagtttcacccacgtagatatcattaataccactaatggcaataatatctccagccttagcttccttaatttcgttacgtttcaagccaaagtaaccaaataacttagtaacacggaagttttgagttgaaccatcacgcttcataacagtgatgttgtcactaactttaaccttaccacggtaaattctaccaacaccgatacgaccaacatagtcatcccaatcaagcatggtgatttggaattgtaatggctcatcagagttgtctactggagcaggaatattcttaataatggtatcaaagattggatccatagtttccttttgagtacttggatctggatcatatgatgaagtaccattcaaagctgatgcataaacaactgggaagtcaagctgttcatcgttggcacctaattcgatgaaaagttcaagtacatcatccaaaaccttcttaggacgagcgcctggacggtcaatcttgtttaaaacaacgataggttttacgccagcttccaaagctttctttaaaacgaaacgagtctgtggcattggaccttcataggcatcaaccaaaagcaatgcaccgtcaaccatgtgcataacacgttctacttccccaccaaagtcagcgtgacctggtgtatccaagatgttgatagtagtatccttatacttaacagcagtgttcttagacaaaatagtaataccgcgttcacgttcaatggcatttgagtccatagcacgatcttccagattcatgtgttctggcaaagtatcagattgcttcaataattggttaaccaaggtagtcttaccgtggtcaacgtgggcaatgatcgcaatgtttcttagatcgtctcttcttttttctgacaaaagtattcctccccactcttcaataaaaaaactgtgactctgtcacagtttcggtaacgcattagcgccttatcgaagtgcttttcttaaatctgtatagttacgttagtgaattttaccacctaactgcatacgggtcaacgcttaacaatcaagttaaccctggatttttttatgcaaaaacaagcaaaaactattaaactatggtaaaaatataatgtagataataatttttaaaaaggagtaattattttgatcttaatgaaagatatcgtacgtgacggtgatcccgtcttacgtcaagttgccaagcctttaacatttccatttagtgatcactataaaaaattagctgatgatatgatgcaatacttaattgattcacaagatcctaagattgctgaaaagcaccaattaagagcaggcgttggcctagccgcacctcaagtaggtgaaggtgtacaaatggctgcacttttagttcctgatgatcaaggcaaaattatctttaaagaagtttatgttaacccagagattgtctctgaatctgttcgtcaagcttgtcttagcgaaggtgaaggttgccttagtgttgatgaagttattaatggttacgttccccgccctgataaattaaccattcattactacaccgttgacggtgaagaaaaaaccattcgcttaaaggattacccagcaattgtttcttctcatgaaattgatcacttaaatggtcacttgttctatgaccgcattaataagcaggatccattcgcacttaaagaagatacagtcgtaatttcttaattgttatttaaccaaaacaaaagcctgcagatgcaggcttttttgtataaaaaaagtcactggttaactaggccagtgactcatacattgggaattaagaagattgaagagacttcttataacgagcaaatgaatttattaatcatttactacatgattatcgtacaactgatgttattttacgtcaataacattgaccaaatttaatcggtaaaaatcaaaagaaacataattatatacttaactttataattatgataaaatttttatagctattgagtaatttttactctacattgaacgtttatacattaataaggagaatcatttatgatttacaaagttttgtatcaaaaagacaagattgtcaatcctcgtagagaaactacacaaactctttatatggaagcagacaacatggtcgaagcaagaagtatggttgaggacagtaccccctataacattgaactcatccaagaattaactggtaattcgttaacttacgaaaaagaacatgctgactttaagttaacaacgttcgacaagaagtaataaagagtgcgaattaaaaataatgaagtagccgtttatgcaatcggggggttgcatgaaatcggcaaaaatatgtattgtgttcagtatcaggatgaaattatcatcatggactgtggtattaaattccccgaagataacctattaggtattaattacgttatttcagactattcttacctaatcaagaatcgtaagaaaatcaaagctcttgtggttagtcacggacatgaagaccatatcggtggtattccatttttgttagaaaaaattcctgaaattcctgtctatgcgacaccatttgccctttcattaattagaggcaaattggaagaacacggaattttaaagacaactgaactacacgaagagcatgaggatactgttttgaagtttaagaaactttccgtttctttctttagaactactcactctattcctgatactttaggtattgccgttcatacaccactcggtgccgttgtctttactggtgactttaagtttgacttaacaccagtaatggatcaacctgcaccagattttcaaaagatggctcaattaggcaatgaaggtgtacttgctcttctctcagattcaactaatgctgaagtaacacaatttactaagtctgaacgatttgtagctaagtcactacataatatcatcactggaatccacggtagaattatttttgccacttttgcatctaatctttatcgtgtatcaactgctattcaagctgcaattgataccggtagaaaggttgcaatttttggacgtagtatggaaaatggcgttgataatggggtcgacttgggctacttaaatttgcctaaggatctaattgttgacgcagatgagatcaacaaactaccacctgaaaaagtaatgattttatgtactggttctcaaggtgaaccattagccgctttatcgcgaattgctaatggtactcaccgtcaaatcagcttacaacctggtgatacagtcatcttctcctctaacccaattccaggtaacacattaagtgttaaccacttaattaataagttaatggaaggcggagccgatgttattcacggaagagtaaataacgttcatacttccggacacggcggccaagaagagttaaagatgatggttcgcttagttaagcctaagtacatgattcctgttcatggtgagtacagaatgcaggttattcacacccagcttgctcaacaagccggtgtacccgctgaaaacacttttgttttatctaatggtgaagttgtctgctttggccctgatggcgctagaatcacaggacatattcctgcaggtgacgtttacgttgatacttctggtactgcagatgttggcaacgttgttgttcatgatcgtcaaattctttctgaagaaggtttagttgttgcagttgctacagttgattataagcacaagcgagtcttagctggtcctgatattctcagtcgcggatttgtctacatgcgtgaatcaactgagttaattagtcaagcgcaaaagcatgtttatcatgtgcttagaaatgaaatggctaaatcaaatagaccaaaagaaagtgacattaaaaaggcgatcaccgaaaatctttcagacttcttgtattccaagactgaacgacggcctatgattttaccaatcattatcgaaaagaaatagtaaaaaagactccttagggagtcttttattttagaaaatgaataatatgcataaaaaaattaaagttcagttattagttaatgaggtcgctgggaatggcaatgctattaaagctgataaagaattacaagatatactaaaagaaatgaatacgcgtggtgctagttaaatcgttctagacaataagccaaattataagctaaaattgcaatttccaaccggctttgaaagcctatcagactacgtgctcgattgttctcggcattgtaataggtcagaagcgaaaagtcgctttcaattgttctgcgaatagccatcaattgatgatcattgtgctttttagctcctgtcatatttttacgatatggtgtccaaagttcgtaacccatttgttttagctgttgatgcagttctttgcctaaatagccttcgtcgccaagaagatagtaattagatggatgggtattttctatcagttcaactgtctccctggcatcatgaactgatgcctttgttacgacataatcaagaatgtaaccgtcatcgctaacaatggcatgaactttgaaaccatagaagtaaattttcttggtggccttataaccaatgttggcataaccgcgaaaaattttagcacgatagtttcgaattggttggcaaacaggtaccggaaagctgtcaatgatcaagaactgtccattcaggtcaacctttttattcatttcttgccgtatctgataaatcaattgcaatagctgacgtgaacgccgattaaaacgtgagtgtgataaacaattgaaacattcacagaatcttctttgtgattcaattcctgtcttagcttgccagataagtaaagccaaaatcagactgtccgtagttttaatttgatcaatatttcgccgatgagtaaactcagccggtgcatacaaacgataccagtgccgacaaattatcactaaatctttaaaactaacttgtaaatggtggctaaaacgcttaagcttaaggcagttcaatcagatcagactcttttctattattactatttacaagtcgagtctaacaagattggacttttttattaactaaaacgatttaactagcaccacgcgtaaatgaatattccttttaagcgacaaaaaagtcattatcctggagaattagtcgttctagcacaaaattacgctaatttacatctctcttctgaacatgttttaatcgtagttggtggagatggctcctttaatgaagttttaaatggaataaagacttctaattatcctgagacagctattacttatttgcctgcaggaacaggcaacgattttgcccgtggtgctggattaaccgcagatcccaggcaattaatcaacaatttgctccgagatcctgaaccggaacaagttgattgtggttttttcacatcaaatattaaacaaattcctaagggttactttgttaataatttcggtattggttttgatgcctttgttgttcatcagagtaatcatgagcaattaaaaaaacacctcaatcacctcaattctggaaatatgatttatggcctaaatataatcaaggcactaattaagcaggatacctttacagtgactgttaaaactaaaaacgaaactcttcgttacggagatgcatactttgtcactactactaaccatccctactttggcggtggttttgctattttgccaaaagcggacatttacagtcaccatcttgatacagtaattgttgaaaaaccgagtttacgcaagtttctctggctttttggtaagctgatcaaagatggttcacacgttaatgcaccagaatttcattatattgaagctaaagaaatcctagttcaaaccaataaaagtgaatatgctcaaattgatggtgaagatattgaaaagcagcccttcaaagtaacatttaaagttgatcattttaatttattaaaataaggaagaattccaaattcttccttttttaattttcctgaattgtcaaattaagtgcaacagttaggttatgaagagatatattgcttgaagagttcctctgctgtgtgatattggaggattcggcgatatttgtggttaatggcatcagttgcctgttgaacataagcttttgacttgtctttcatgctcttgcccttagggaagaattgacgcaaaagaccattgcagttctcattggtgcccctttcccatggagaatatgggtgagcaaagtaaatctggcagcccttgatcttggtcatatccgcaaactcagagccattgtcaaacgtgattgatttaaaccaggcaggatgtctgtcaatctccttttgaagcagcctttggcatgtgcttgcccgatagtcaggaatcttgataactacttcaaagcgtgtggttctttcagtcaaagtcattaaagcaggctgattcttgcgtctgacgcctttaaccagatctccttcccagtgcagcggagcttttctgtcttcaacctccttaggacgctgttcaatggaattgccaagatgcttcttgtgcaaagcgtgaccgccatggctgtgatgacgcttgttcctgcgtcttttgagcttcataggcagatcaatattgcttatgtccagcaagccctgatcaatatagcgatagacggttggtgtgctgggacaagggtagcctggcatagtccttttgaattcaccaacgaactcatcgatgctggtggcatcaaatttagctttaaagcgtctggagagcattctcaaaaagacagcataatgcttcaatggattgcgctgatagcagtttttgcgacgcttctcataataaatctgtgcagtatcagcgtaatagtgctcatacaataaatagctgctgtctctttgcaggacgcttccgcatttgatttcgcgactgattgtcgacttatggcagccaacttcttgagcgataacagtacgggaagttatgccggaatccagcattgcttgaatttgtccacgttgtacgctggttaattgatgatagtgcttagaaatgctagaatttgaattggtcatgaagatcttcctttcttgatttttcgtcacttcaagtttaggtcttcatggcctttttgtttaacacttagtgttgcacttcaattttaaatccgggatttttaattttatctaaaatatctcttttcgaattatgattttgataatattggtcctgatcaacgaaatcatgtacttgatcataaaatttcttccaataacggtatttttgatactgcttttgccactcccgtgcttcctgcaagtaattaccaagaagtccattaatctgatcgatatgtttaatcacctgattagcatgatacaattgctcttccacctgcttttgagttaacgttgactcctgatcttcaaaaaatagaacattttcttgataatttttttcttcttgcaattgtttactattgtccatttcttctttgatagctgcaatttcgtctggctgtaatccaattccagttttagctttgactaataacgactgaatatctgccaattgcacaacatctatttccattttttgataacggttcgaatcagtcaatgtgaactcatcatctgttctacttacaaatacaaccacgtttctgattaattgatctatatttggcaagcgtctcaataaattaataatcactgggttgttgcttttttctaggacatatttaatactttctttatgcttggccacttgatcggctatctgatcataatcagcctgcacattatactgtccatttttacttgttcgtgctttggtttccaagcaaaaaatcccgctagtcgtaattatcacatgatcaatttggttactccctaaactattctttttttcatagggatatggtaacagtaaattatgaattatttctttccctgtctgcacttcacgtaaacgagaattcactaattcttctgcggcagcgcctgccaagagattgctaagatggcgcaaatcacgttgagataaaatattcataggtcgcaaatgttttatttgattcaaatgtagttcagtcattcttttctgaaatgcgtttactttttgattgtaaaccttatagccagaattaattgcccgaattcgtaaaacattttgcagagccaaagctcgtttcaaatcacgtttattattcaacaaagttttttcaactatcatagcatcatgaacagtttgtgaatcagttacttttttatgtgtaatccaagctttttgataactagcatgattttctaactcattcacatactgatttaagtcattttccaaaggcaaaattttgtttctaccttctttgactattgagccataatagcgcaaattttttgtaatttcgtctaactcattgaattcatgtttgccataatggtaagttaccttagtttctccattccaactagtcttacgccaataatgaccatccgtctcaccaaattcaactaattccgccactgaacgatctaaatagtacttaatcaaataatgacaatggcctttattgtcaaaaatgcgtcgcttaatataacccggtcgcattaattcaatgatctgaaaggtcaagttcttatgattaggaaaacggtatggtaatcttttgcctgcaattttttcaattttagttatttctttcttatctgttacagataattctatttttttcattttcttcttttttcgcttttgaaaaaaataataggttaataagcctattgttagtgtaattattgtaatatccatgttaattatccatattttggaacgtatgtttagacaacaataattataccatgattttgtataatgaaaaagccccttgttttaacaattcaaggggcttttatccttataatttgatattttccattccaatcattggatcaatttcaccagaatatattttttccgaggttagaacaaaatcttctgctacttctgctttatcggtttcattctccatttcttgagctttttcgtgctgcttgctttgatcagatttatccaatgattttgtaatacccaattgctgacaaatcttcgctgctaagccagtcttacgatcatttcccggcgtcttaaaagctgccacaaatgcccgtggatcaccaactaatactaagtttttctcagctcgcgttattgcagtatacaaaaggtttcgttttagcatcacaaaattctgcatggttagattcaagatcaccaatggaaattctgaaccttgtgatttatgaatagtgattgcataagcccgggtcagatcatttaaatcttttctagaaaaggcaacttctcttccatcaaaatctgcaatcatgcattccttggcatcatcttcatcaatgctaatgatcttaccaatttgtccattataaatatctttttcaggattattttgcaattgcagaatacgatcgccaattcggaaaacttcattatgtgcttctaataccttacttttaggctgagatgggtttaaaattgcctgaataacattattaagattagttacaccaccattgccaagatacatcgcgctaagcacttgaatatcatcttttgcaaatccacgttttaaagcaagtttaacaatttgtccaactgcatcccctactaattcgggacgacagctaataaaagaataattatttgttttcttaaacaatgcttgctgatctttaccctcattaacatcatgcgccaaagtaataatcgttgaatcatcaccctgtctatgaatctgcttcaaaatagtagttggaaacgcttgcgatttaatcaggtcactgaagacattgccagctccaaccgaaggtaactgatccttatcaccaacgaaaacaatatgccgcgtatcatgaatacttgccaaaagttgtttaaaaaggaacatgtcaaccatcgacatttcatcaacaattaagatttcaccatttaactcattcaagtcctgagtgttagtatcaccaatacctaaccccaacattcggtgaattgttttagcactgattccggtaatttcacccattcttttagctgcacgtccagtcggtgctgctagtaaaaacggaggatcttcactgtaaagagcggaggaaggaatctcagccagcttgcgtaatactaataaaattccattaatgatagtagttttacctgtacctggtccacctgtcaaaatagaaatcggttggttaactgcgtttttgatggccaacttctgtgtatcgtcgtagtgaatcttaagttccttttcagcatccttgattgcttgctctacctttttatcatcatattgttctctttttttatcttcttttttttctaccaagtttttcatcaagcgagcaatatcaacttctgtttgataaatattttgtagagcagcattctcaccatcaactattactttgccagcttcttgtaaactattaatacagctagcaattgggtcgaattgattgatttgaagcaatttacttgcttctgttaataactcagctaagcctacataagtatctccctcaccatttaaagcatcgagtaatacttgataaacagcacctttaattctacgtggatcatcactagcaatatctaattggcttcccatcatatccgcggttttaaatgcaaaacccgaaatatcattaactgctgcataaggatctttctctagttttgctaatgcttcaccatgataaagctggtaaacccgtcctgcaatacgcttattaatgccgtatttagccaattttaaaattacttctgaataagaatccatcgcatttagtcctgccaaaagactatccttttgctttctagttaaagaaagcttatcaatcttagctggactttccttcaatacatctaaggcatttagccctaattcatcaataatcgtagtcgcagcctttttaccaattccagggaacttattcgaactcaaatacttagttaaagatccctcttcatgtggcaatacttgcttatagttatttgctctaaactgcaagccaaatttttcatgcattactagtttaccctcgaagcgatagctactattaatttgaatatcgccaaaattccctgtcaccttaatatcgggacgagaataatcggataaagtgccgataatttcaacgtcaagaattttatacaagtctttactattttcaaaaacaatcccgttaaccttaccggtaaattcattcataatttttcttttccttgtcatttagcatcttcataattgaagcatactgattcattgcttgttgataatacttagcatccatctgcttagcttgagcaaaatatttttgagcctggtcacgatctttttctaatgtagtgacacctagtaaaaaataaactttcgcatttttcttattatcaggaattgccaaatacatttgctgagcctgttgattctcacccaaacttaaccaaatatcgcctagcaattcctgaattcgctcatcaatttttttgatcgtcaaagcataagctaaagctttttggccttgccctaattttaagtaagttagtgccttttgataaagagttaagtcatcattaggtatctgatctaataaagccagtgctttatcaaaatcgccttgcatgtaataacacactgccagattataatttaattcttgtggctctttaaccagatgctgggcctgctccaatagcttctgtgcttgatccaagcttccttgctcaattaaatacgtcgatagctgcaaataattagcaacttgttgtggatgctgatcgatttttttgattaaaagatgaatggcttgttctactttaccttcatcataaagttgcgctattttttgatccattataacgagtccgtcttcgataatttacgtcctaaataactagtttcattccacactaccggtttaaaagtctttccgccatctagtgtttctaagacagttaaagaggtattgctaaggccgccatttttgcgaatatctttcaatggatagcctaaaagtccacccataatagctgataatgccgcaccatgactaactgctagaatcttatcatcatcgtcaggaaatctttgtgccatttcttgagcaaatgcttttccacgagcaataacatgtggataatcctcaccatgaagttcagtcggatcatatttatctggatggtgccaaaaattatccatttgtttagggaattttttctctgcatccccaaacttcattccctccatatcgcccaaattaaactctctgagtcgttcatcgatcacaacaggtaagttagcgttcattgcatcatcgatgccctgagcggtattaaaggcccgatcaagcggactggcaaaaattcctctaaatttagttccttgcaagtgatgacctaatttttttatatcttctaagctttgtggcaaaagtggtgaatctccatgtcctccttggaagcgactagctaaattccactcagttttgccatgacgaacaaaataaatttgcattgcttaaatccccctaattgtctaatcaataagaatagtttagcacaaagaaaaaggcgttcgaaaaatcgaacgctctttttgcatattttttaaactaattgtaattgcttttcttcttggtaagcagcatcaatattaccgccacctaaacattcttcacccttgtataaaacaagtgcttgacctggtgtaactgcacgagctggctcatcaaagtaaacatcagcagtattgtctgcggcatgatacttaacagtcacgccgatatcacattgacgataacggaactttgcagtacagtgcatctcaaaatcatgatctggcttaccagtaaagaatgacatatcacttgcattcaagcgactagcatatagaagtggactatcatagccctgctctacaattaattcattcttcttaagatccttgccgaccacgaaccatggatcagttgattccttagttgagcccaagcccaagccctgtctttgaccaatggtgtagtacattaaaccagcatgctcaccaactaccttaccatcaggagtgaccatcttacctgatttagctggtaagaattcacttaaaaactttctaaagtttctctcaccaataaagcagatacctgtagaatcttttttcttcgcggtagctaaaccattagccaaagcaatctctctaacttgtggcttagttaggttagctagagggaaaataaccttactaatctgctcttgactcaattggctcaaaaagtacgtctggtccttgttaccatccttaggacgcatcatatgagtaacaccattggtatccttaacagtcttagcatagtgccccattgcaatgtagtcagcatccaagtccatcgcaaactccaagaacgacttgaacttaatctgactattgcacattacatcaggattaggggttcttcccttcttgtattcatccaagaaatattcaaaaacgcggtgccaatactctttttcaaaattaattgaataatatggaataccaatcttatcggcaaccttttttacatcttcatagtcttcagtagctgtacagacgcctgaatcatcggtatcatcccaattcttcataaagacaccaacaacatcgtagccttgttgtttaagtaaaagtgctgaaacagacgagtcaacgccaccactcatacctacaactactctagtcttgctattgtcaaccattattcaatcaatcctttacttcaagcaaaatcttacgctcctcaagatcctttaaaatataatctaaaagttctacagtaggagctaattgcttatttttaaaaatattaaccttctgcaaaccgttgcgatcagtaataaccatagttaaatgcgacaagtccttattaatggtcatctttaacttagtaggcgcgttataaggtgaatcattgtaaagaggatgttcataattaaaattacccttagctgtcttcacaaagccagcatcaatcaaagcataaagcttcaactcaagattcaaagtaaacttacgtttatcaccattaatcacaactgtatttgccataattttcctcacttatttataataagatactttctttttgaaagcaactatttatttttagattgaattctttgtacaatttttactaattcttgagcgaattgctcaatttcttcatccgtattataacgcccaaatgaaattcggatcgactcatttattcttggtgaattttctccaaaacaagcaattaaaacatgtgatggctccaaagaaccagcagtacatgctgaaccgcctgacacggcaaatccattcaaatcaagatttgtttgtaaagaagtagtagatacaccattgagatgcagattaagcacatgatgtgagtaacccggaccatacccaccattaatttcataattaatttgatgatcgtctaattcctttaaaataatgtcttgataatgagcatatttcttttgcaaagcatcacgaccaatctcggatacttcacggacagcttcgccaaagccggcaattcctggtacgttctctgttccagctcgacgtttggtttcctgctcaccgcctaaaatcaaatttggaatatcgatatccgcattttcatataaaaagcctaaaaacttaggtccattaattttatgtgcagaaacagacagaaaatcaatgttcatgtccttaacatcaattttaattgtgcccattccctgaacattgtcaacatgaaaatatgcattggagtcctttaccattgccccgatttctttgagcggcataatggtaccaacttcattgttaacggccataatcgatactaaaatagtgtctggcgttaattccttttttaactgttctaaagaaatttgcccgttttcatcgacattcaaatagacaatgttgtagccctcattttccaaacgtttcattggattaagaaccgagggatgttcgatcggcgtagtaataatctttttaccaatatttttacgagcataggcagttccaagaatcgctgtattattgctttctgaaccacctgaagtaaaaataatctctccatcttgagcattaatatcttgagcaatctggtgacgagctcgatcaattacatttctggccctacgacctaattcataggtactagaggcattaccaaaatcatttttcatttcatcggtaataatatcaattaccttgggtgacattggtgtcgttgccgcattatctaaataaatttcacgcacgtttaattcatcttttctacataatcactaattaacttagctgccttagcgccgacttccttgacaaacttgtcaaaatcattgtctgcattagcatccccattatcggaaattgcacgcatagcaaccaacggagttttaaaatgacgagcaacttgtgcaaaagcggctccttccatttctactcctaaagcttctggaaagtttttcttgattaactctttttgttcttctgattgaacaaaagtatctccagtaacaacaagcccttccttaaaatctacgtcttcttcacctaaatatttcttaaatgcttccctttcaggcgaattcaacttaaaggtagcaggctctcttggaatctgaccttctacatattcaccggcactaacacagtgagcatcgtgataggcaaaatcatttactaaaatcacatctttacgatgaacatcatcttgtaatgatccagcagaaccagtcataaaaattacatcaattttttctttagttagtaaactagtcagattcatagcggcattcactttaccgataccacttaaacctaaatatacatcattgccattaacagaaaaatgttcgaattctgttgatccgaacatttcttttgtttctgcatggaaatgatcacgataaaattcagcttcttccgccattgggacgataatcgcaatcttcaatttatttcctcatttccactataaatgaaatagtgctaatagcaccaatataattaaaacaatcactatcaggatagcacgattcaatctttttttcagtcttaaagacttctcttggcgaatcgtttccttatcactcgattgattatgctgataaaattcttgtccatccccagccagagggcgtcttctaggttcttcttcagagtcatcccgcttaaagtcaggatttacatctacttcttctgaatcattatcagaaaaggaagattttagcttattaagtaggctttttttctgccttttacgataatcagagcgtttttctaccataactaatccttattatcggtctgagcattacgcaacatcatattctcccaaacagtaattgcataaattgtctttgcatcaacaatttttccttcagccaataaagtttttaattcatctaagctataccaactagaagttaaaaattcatctgcatccagtgcccgcttatcagtcaatttagttaaggtatcacaatagaaaagatacatcttttcatcacaaaaaccaggagaagaatagaattcactgaccttttcccagtaatctgtgcgatagccaccttcttcattcagctcacgcttcattgcatcaagcggacttgcatcagtggaatcaaccaaaccagctggaatttccaaagtaatctgcttaattggttcccgccattgctttactaacaacatcttttgttcatcattaattgcaataacagccgatgcaggcttatgcttaataacttctctagttgcagtttcaccattaggaagcttaattgtacgaacagccagatccaaaatacgtccttgaaaaatctgctgtgacgagatttctgtttcctttaaatccaaaatcccagctcctttttaggctaaataaacatttacacattgcagaccatttttaccttgagctaactgatatttaactctttgacctacttgcaaagttttatagccttcctctttaattgctttatagaagacaaaatatgacttatgattacgatcatcttcaataaagccatagctactgccttcatcaaattgttttacagtacctaaccgcattagttttcaaatccttcttgaacagcttctgggtaatctgcttcaacgattttagcacaacgaccacaaagcattggcaactttggatctacgccaatatcagttctaatcatccgacaacgaggacatacttcgccttcagcatgttcaactactacactagcattattcaattgctttgcattatcaggtgcttcaccatcagcaatagttaacttagatacaattagaatttgtctgaaatcagcatccaagtcttggagcattgccttagtttccttatctgggtaaatagttactgttgcttcaaacgatttaccaattaacttcttatttcttgcatcttctagagccttcaagacgtcatcacgcaacttcatgaatttaccccaattttcaagcaaatcatcatggttagcatattcttcaacttctggcatattagcaagttgaacgtaatcttcaggttctttcaagaagccccagatttcttccatagtgtgtggcaaaattggtgttaagatcttagccaatttaacagcagcgtcgtaaataacagtttgcattgagcgacgatcatggctgttttcaccatcaatgtaaagtacatccttagcaaaatcaagataaaatgcagaaagatcattagaaacaaagttgaagaccttcttgaagacagtagtaaaatcaaacttgtcgtaagcagcaagacagtctttaactaagtcatttaatttcacttccatgtattgatcaactgaacgaagatcagcataagcaacgcgattttcttttggatcaaaatcactagtgttggccaacatgtaacggaaggtatttctgatcttacggtaactttctgcagactgctgcaaaattcccattgagactgcaacatcagaagtagtatcagcttgagctacccaaagacgaataatttcagcacccatcttcttaattacatcgtttggtgaaattacattgccaagtgacttagacatcttgtgtcccttatcatcaagcacaaagccttgtgataatacttctttataaggtgccttaccagttactgcaacagacgtaatcaaactcgaattgaaccaaccacggtattggtcactaccttcaagataaagatcagctggatagtgtaaaccatcacgtttttccattacgcctgaccaagatgaaccagagtcgaaccaaacatcaagaatatctttttctttagtaaactcgccatttggtgaatgttctgaagtaaagccttctggcaacagttccttagctgtatgagtgtaccaagcatttgaaccttctttttcaaagatcttggcaatatggtcaatcgtttctggagtaacaattggggtaccgtcttctgcatagaagatcggcaatggtacaccccaagcacgctgacgagaaattacccagtcgccacgatctttaatcatgttgtaaagacgagtcttcccccatgaaggaataaagttagcttgttcaatttgatccagaatttgatctctaaacttagaaattgaagcaaaccattgagtagttgctctgaagacaacgggcttcttagtacgccaatcatgtgggtatgagtgagtaaagaagcttaacttgagcaaagcgccagcctttttaagcttatctgctaccaccttgttagcatcatcatagaacattcctacaagatctggatctggaatatctttagtaaagcgaccttgtgcgtccattggactgaagaccgggataccatacttttgaccaacacggtagtcatcttcaccaaaaccagtagcgttgtgaactaagccggtaccgtcatcatcagtaacataggtgtcattcattaccaaaccatattggcctacaccagtcttaccataaaggggatgcttataagtcatcccatcaaaatcagtaccttttaattgtttaagtactttgtagtccttccagcctaagtcttctgcaatggctggcaaacgatctgaaccaattacatacttcttaccgtcaacttctactaaggagtagtcaaatcttggattaacggtaatacccacgttacttggaatagtccaaggagtagtagtccaaattactaatgaaacatctgaatctaagatacctttaccatctttaattggaaaagcaacataaattctaggtgatttaatatcatggtattctacttcagcttcagctaaagtggattcacttgaccatgaccagtaaactggcttcaagcccttataaatataaccttttttatacatttctccaaagacgcgaatttcttgtgcttcaaagtcatgttgcaaggtaatatatggattatcccaatctgccataacgcctagacgcttaaagtcggccatttgcttttgaacttgttcttcagcatattgtcgacaaagctcgcgatacttagcacgatccattgtcttacggtcaacgccttgcttagctaattgttgttcaactggaagaccatgagtatcccaacctggtacatatggtgcataataaccgttcatattcttgtagcgaacaatgatgtctttagaaatcttgttcaacgcatgtcccatatgaatattaccattagcaaatggagggccatcatgtaaatcaaaacgaggcttaccttcgtttaactttaatctttgttcatataacttgttatcttcccattctttttgccattcagcttcacgaacaggtagattaccgcgcatcttaaatttagttttacctaaattaagggtatctttgattctcattaacaaaattcctttctaaaaaagaaagcctcatcctaaaattaggacgaggctaaccgtggtaccacctaaattgaacttattataagttccacttaactttgcgtaacgtgcaaataccgtttagattaattaggcagctgatcagctcttaggctcttatgctagtcttccaccatcactagctcgctgaattgccttcaagctttactgtcaatctaatatgcttattttttatagtcgtcaggaaaaacaattgttgggcctaaaggatctgatttcatttcaggcttaacattaattgtttcatgacttggactgtccccggtcattggtttaggtgcagcattttcttcattatctgcatcgtcagaatcatccggttgatccaactccaaatcatcagggccttgagaagagtttacgtcattttcatcatcattgtcaacatcttcatcttcaacgtcttcatcatcagcacttactggctccgaaccatcatctggataataacgctctaagttgaagtaatcatccaatgcatgttgccacttttcatcattcaaattatcgatttcagtctgtagcatttcttgaatattactacgaaattcactaacttgctcttttacacgcatataatccgtagaaatagtatcttgttgatgcttttggaagttaatattatcttccgcttgctttttggcatccgcaataatctgcttagcctctgcttctgctttctctctaatttcatcagcagtttgttgtgccgaaattaatgatttatttaaagaacgctttttttcgttatattcattaacttgatcttgataatcatctactttttcttgtaaatcagttaactttttatttaaagaaactacttcattcttcaagtcaaccacttgatcaagtgtatcaccataatcatcaacaatctgatctaagaagctatctacttcaagacgatcatatccattacgaccacgccgtttaaattccttgttgtgaatatccatcggggtcaattgtgtttctttgtctgccaaagtctgagcaccaccttatatttaccttttcttgtagtcgaaacatcctcaatcaaaatccgaccaaagtgtcttaaactcaagacatcgtcttctttaatcattatattagaatctgctatttcatgccaatttaatttaaccagctgactattaatcatcttttgaatttgaccgcggctttgtctgctaatacccgataatacagcatcaattcgcattgaggcaactattttcgttttttcaatcgaatcatcctcaggaaccaaaacttctttgaagctaatcggtctcagctttacttttgctctgccaatgcggtcaatttgctcttcaaaaaattccgtcatttcttttttagtgaaaaactgccattttccttgattatcattaataatatcgccaaaaatacttgtatcaatacccgaattcgccaaggtgcctaaaataacactatgatttattttagtaaatttttgcggatattcaatttcatacggctgaatctgataatcactcggtcgcagattaagccattcttcacttaaataaactcgctttttctctgcattaggatagccaccatactcttgaacaaatgcatcattaccaacaattgttcttaaaattgctcgttttcccggatccaaaaaatcagtcaaaattggctcatgcttaaaaatcagctgattaaaaagaccagtaaaatagtcaattactggtctttcctcttgattaaaatgtgggtaaaacttacttgcctgtctgcgttccattacaccatcatcctcaataaaatatcaaatatccatcttaaaacatagttttgaatgaaatataagataaataaagcaataattggcgagacatcaattccagttgaataagctaatctcgcaaatggaccttttcgaaacaaatttaaatatggatttacaaccttgtctaaaaagcgaccaacaacagaattacttagcattggtagccaactcataattgcatcaatcacgatcagcagactataaagccataaaatccacgtcagtgccaagtagattaaatttaatatattaaccattagcttaaattgtctttcttatccactaaatcactaattttgccatcagtaacaaactttggtggagttgctaaaaagattttatcaccaatacgttggatttcaccatttaatgcatatacagtacccgtgatgaaatcaacaatccgacgtgctgaactgtcttccattctgctaaaattaatcactactgctttattatttaataaattttgtgcaacatccttagcatcggaatatacccgtggttcatataaaacaatcttgcttttagccgaattcaagcctgatttaattgaaaccacattatcgcgattaactgagttcagaggcaagtcttcattttcatttttagtctgtgaggcatattcttcgtcattttctaattcatcatcattagaaattccgaaaaatcttcctaatttatcaaaagccatttatactacctccaaaactagttttcactacgatgtttaaaaaatggaatatcactgttatcatcactatcgtcctgagcgctagtttcaatttgagaaatactatcctggtcttcatcactaaaagtatcaaaaccctcataatctttcttaggctcagtaggttgggtatttcttctttgattgtcttcgctatcatttagtccccaaacactggttggatcaaccatcgtttgcttaggctgctcaggttcttgtttttcggcagcaggctgaactgtttgtggtcgatcaactggttgcttaggttcttcagccttaggagcttcttctttttctttaactggttgagccttaatttgttggctacgacctggtaattgcttagaagcagcttcttcagccttagaatcaattccagtagcgattacagttactaccacctcatcgcccaagttaggattaattgaagtaccgaaaataatgtttacatcgtcaccagcagccttagaaacaatctctgaagcatcttgagcctcaaataatgtaaggtcaggtccaccagtaatgttaagtaacacttgcttagcaccatcaatagaaacttctaataatggtgaagaaatcgccagcttagtagcttcaactgttctattttcaccgctagcacggccaattcccattaaagctgcaccttgattttccattacagtcttcacatcagcaaagtccaagtttacgtagtcagttgaagtaatcaaatcagaaataccttgaacaccttgcttcaagacattatcagcttccttgaaggcatccatcataggagtcttcttgtcaaccatttcaagcaaacgattgttagctataataaccaaagtatcaacatattgctttagctgagtaataccttctgcagcgtttttagagcgcttagggccttcaaaactgaatggacgtgtaactacgcctacagttaatgcgcccgtctcacgcgcaatttttgccactacaggagccgcaccagtaccggtaccgccacccataccagcagtaataaagatcatatctgcacccttaagtgcatcttcaatcgtttgttcactctcttctgcagctttttgtcctacttcaggatgtgaaccagcacccaacccacgggtcaacttaggccctagttgaatcttgttttcagctttgttgctgttcaaagcctgaacatcagtgtttgctgcaataaaagaaacaccttgtacgccatcgtcaatcattcggttaacagcattgccgccggcaccaccaacaccaattactttgatgacagcattcttattgtcgtctgaatcgaatgtaaaatccattaaattaaccacctttaatcaaagaatttcttaaagaaactcttcaagctattagttttttcttgcttagtattattttcatcgtctggcacagattctgttctggcagacattttgcttctattataagcttctttagcttcactttcactattagaagtcgtacttttagaaatcttggtactttttggctgagaaacggggtcttccacagcgggttcaccaaaaccatagattacgccattaacaagatagtcaacttcagacatcttatatgaatagtggacgataccataagcagctgtataaatcggattacgcataccaatttgatctggttcataaattcgggccttaacatttaacccattagcagtcagactatcaattccttgtaataggctactaccacctgtaatcacaataccacctggttgcttcaatgcattatgcttaactaaaccttttcctaaacgagtcaaaatttgttctaagcgtgcattaataatttcactaagatatacttcgtcaaccatttgctgactatttgcaccaacactattaatagcaaatttatcgttttttgaggcaaattgtggatccgcaaatccatagtccaacttaatttgttcagcatcctttttcgaaatacttaaaacagcagagatatcattagtaatatcgcttccgccttctaaatcgatgttggcatacttaatttggccatctttaataacagttgccgtacttacgccaccaccaagatcgataattaccgaaccaaaagttttttcactttcattcaatgctacacttgaaattgctaaaggcgttggcacaaagaaattattatgataaccggctctttcaatagccttcttgatattgtgcaaaggactagtaggtgcagttaataaaattccactaacacccaaggaacgtgcaatcatttttcttggatcatcaacttcagttttaccatcaatcaaaaagcgactcggcaaaaatgtaattgcttcacgatcatccttagctgctgaatgaatcgcagatctaatcgttctttttacatcatcattatttacttcttgcccttgttcaccaacattagcaaaaccagttgcagtttccagttgtaacatccctaccggaattcctgtaactacactataaatcttggcgtttgttttttctgctacaccttttaatgcacgactaattgcactagcagtttgatcaatatctactatttgaccgtgtcgcattcctgaatttggcgttgtaactgcaccgataaccttaccagaatctgcaacaacggcttttacacttgtggttcctatatctaaacccactaaaagatttgaattctccaaaattaagcccccattaatatttgccttgaaaaaattctaacataaataaacttgcaaaacagctacgatatgccataagctttcttttcactagaagttaatggtctactaaatgcacctatttctaaatcaataaggctatgtttaccagctttaattctaatagtatcataatattttagtttgctattcaaagtagcagtattgccaatcactacattaccgtccttcattactaaaataatttgtgaatttcgtctggtattcccacttaataattttacctgatttttaaatgaattaggtaaactgttaaataactttaaatcattttttaactcatctgatttattatagccaacaaaaataggtttatcttggttcacttttgtccaaggtagagctctcgtacctatttttccattatccaaaatctttcggtaagaataaccatcttttaagtaacccacggttttacgttcattaatttgtaaaatcaattgattaatatgacctaaatgaacttgtgcactttgaatttctggatatttttgggataatctttgactcaaatctttttgttgaaacaagtaatcaaaaactttatcgctagccttgatcttggataccttaacaatttctttagcaggtaaatgctctgcaccaattattttaacagtactgatattcgctaaaggtgaaatatagtatcctaaaccagctatcgccaaaactgaaaccgtcattatcagacctagcctacgtcgtaatgatcgtcgtctttctgcctgtaaatttgagagtgaggcagaaatcttggtctgcgattttcgactattcctttgttggttaaattcatgattcaagtacggagacaattctttccttggatcaatcttagttactggctttttggccatctgcctcacctacctcctagcgtgaaatttcttccatcaccttaatcacttgatcagatgcatcaggtacgcctaaagccttagaagctttgctcatttcagtagcatacttttcatcgagcaaaatatggtcaattgaagagacaaaattatttggatttaaatcatcttctggaataaccaatgctgcaccagctttttctaaatcaagcgcattcttcatttgatgattatgagttacattagggcttggaatcaaaataacgggtacacctaatgcagtaaattctgcaatacttgttgcaccagatcttgaaacaacacaagtcatttctggcaatagacctggcatgtttttaatgtatggcaaaactttaatattattaccaatatcaacattcttaattttttcttgtaccttatcaaaataaaaagtacctgttgcccaaataatttgatatggtttttgctttagcatcattaatgacttaagcataattctgttaattgctaatgctccacgggatccaccaaatactaaaacagttggcatttttggatttaatccccatgttttttcaagatcaattttttcttcgtgcaagcttaaaacttgttgtgaccgtggattacctgtcttaactagtttcttcttttctgagaattcctttgcagcatcatcaaatgtataacaaattttatccacataatgacccaaaaatttattagctaatccaaccactgaattagattcatgaatcattgttggaatatgcattttagctgcttcataaaccatagcaccgctaacgtaaccacctgtacctaaaatgacatctggtttaaagtcccgtaaaatttggcgtgcgcttttagtagcttgtaaaaatagcttgatagtctcaaagttttttaacggatgtttacggttaaagccttgaatcttaattgttttaaagttaacaccggctgctggaacaatttttgattccaatcctttttgtgtacctacaaataagatttcatcgtttttactaataccgcgttctttcaaacgttcaataattgccataattgggtaaatgtgaccgcctgtaccgccacctgtaaaaataactctcattttatttagtctttaattcctcaacaaatctaacaaagtaatcgccacgttcttcaaatgttctaaattgatcccaagaagcacatgctggtgagaacaatagtacatcgcctggttcaactaattcccaagcacgaggaacggcctcttgtagtgtattaacaattacaatgtccttaattcctgcttttctagctgcgtcagctaacaaatatctagtttcaccataaagaacaattgacttaacatgttttttaaataatggtaccaaatcatcaaaagtgaagccacggtctaacccaccagcaatcaatacttccggttgcttaaatgatggaatagctacagttgctgcttcaatattagttgacttagaatcattataaaccttgcagccatcaagtgttgttacatattgcaaacgatgcttagcgccagtaaaggtgctcaatactgcggcgatatcatcattatcagcgcccataattttagaaattgcaatagcgactaaactattttgcaaattatgaatacctggtaatttaatatcagaaatcttcataatcttttcgttttgactttcaagatattcatcgccaatgaaataatcagcattatgatctgtctcagaaaaagtttgcattttagctggtgaaacttctttttccttagccaaaatatctttttgatcataattagcaataaagtaatcattactgttttgcgttctagttacattcaactttgcattgacataattttcaaaagtcttgtgataatctaagtggacgttgttgtaaatatcaacgatcgctgcaactttaggatcaatatcagttacacccaaaagctggaaactagaaatttcaactactaaaatatcatccttagttgccttaggtacaacttcagaaatcggtacgccaatattaccaactgcataagcatgatgaccagatttttgcaaatgatggtccaaaattctttgtgtcagcattaccgtagtagtttttccatttgaaccagtcacacaaacatagggagcatcactacaacttaaggcaacttctggttcagtaataatcgggatattcaactcctcagctttttgaaccatcggattttcatagggaatacctggatttttaactaaataatcaaaatgttctttttcaagcaaatcaactggatgatgaccgccaattacgcgcacgccgcgacttttcaattcttgtgccttagcatttttctccaaatcagctttatcatttaaagttaaatttgctcctaattgcaaaaggagttcgctaacagcaaaaccacttttacccaagcctagaaccaaaatgtttttattattataagttttaatatccttcattttatgattatccccaaattactaaatacaaaatactgccaattaatccaactaaccagaagacaatatctactttccattctgaccaacccaacatttcaaagtggtgatggataggtgtcatcttaaaaatacgcttacccgtagtttggaaagaaattacttgtaaaattacactagcagtttcacaaacaaaaacaatcccaactaacaataatgaccagggacggttaagcataatactgattgttgctaaaccgccacctaaagcaagtgagccagcatcacccatgaaaattttagccggcttatggttaaaaataaagaaggcaattaaaccaccaattacactcatacaaaaggccaaaacagcaaaattcttttgtttgaatgcgatataggcatatgtaccatatgctacaactgataaacctgttgctaaaccatcaagaccatcggacaagttaacagcatttgaaaaaccaaccagccaaaaaataataaatgccacaaataaaactaagctatggacaaccccagcaaaaggaatatataacccaaattgaaaatgatcacttgtagcaatcaagacaattaaaattgcaattataatctgtaatgctaatttttgccatgcacgcaagcctaaattacgtttgaagtaaagcttaataccatcatcaaggaaaccgataataccgtagcctaagagactgattaccaaaatccaaacaactttattcaagctgtgctgcatagcagctacccaaataacagaaataactgctgcaattacaaaaacggtcccacccattgtaggtgtgccagactttttttgatgccatttaggaccttcatcacgaatttcttgtccttcgtgatgtgaccgcataaatttaatcaacaatggaataaagatcactgtcaaaaccagtgaactaactagggcaatacaacttgccaacatcatattcattctgagttactcctttaacttaatgtttaattttcttccagcttttaattctgttcctttagccacgctttgactcgcaacagtgccggtaccttttatgcttaacttaatatctgtcaaactagcaaattggtgtaaatcactataagtccatcccgtcatatcaggacaaatgatttttcctgaagtattgacaaaaatcttagacccagactctaacttttcgccactcttaactccttgattgctaatccgatcaccgctaccaattttaaccaaattaagtcctaattgcttagtttgactttcagcttgtgcaacggttttagcttttaagtttggtacttttacagtagttgatacatcatcatttttagcaatcgaaatgattctctgcatcatcggtttgaaaattgaagccaaaatcttttcagctccgcctccaattaagtgtggttgcttaattgtcaaataaatacagtaacgtggtttacttgctggataaataccaacaacagagaaaatataattactatcaccctttagataacctccacctttagggttagcaatctgcgcagtccccgtcttaacagcaatatcggcgtttcccatcttataagcagaaccagttcctgattgcttattaagtacctttctcatgttagccacaattacttttctggttttagcactatatactggagtaccaacttttttaatctgatagccttgaattgtattgccatcagagtcagtaattttattaaccaactgtggctttaccatttgaccattattagccaaagaactataagcttgcatcatttgcattacattcacagtaacgccttgaccaaaagcagtaattgcttggtcaactggtgttttaaacgaaatcatccccggctgctcacctggaagactgactcccgtcttttcaccaattctgaacttcctcaagtacttcttccaagtcttagcacccatcttttgttctaacttaacaaaaccagtgttacttgaacgttcaaaagcttgagaaaatggaattgtgccccaacctgaagtcagccagtcatggatagtcgaaccagcaatattaacagaaccagaccggtaatactcattagggttgtaattgccactgttgactactgcagcgaatgacaaaatcttgaaaactgatcctggttcataagtatcttggaccaagatatcccgatacgacttagttaatcccttcatagtttgaggattaaaagtagggcgttgagaagttgccaaaattttcccagtcttcatgtcttcaactgtagcagtaattgatgttggtcggtaagttttctgtacttcacttaagcgagtctcaagcaaactctgcaactgagaatctagtgttaaatacaagttgtttccatttttagcaggcttataaacctgattactatttggaagctgatattcagatgcatctaccgaagaaatccggtaaccatctgtcccagtcaaagtcttattgaaataggcttcaattcccatagttccgactaagttttgtgcattagtctttttattccaaattggttgagccaatccaacagtatgtgatgcaaaaacaccattgggatacaatctagatggtgtttccaagaacttaattcctggtaatttcattgcttcaatctttttcttttgccgcaatgtcagtccactaccacctgtcccaaattgtacctgaaagaccttctttttgggggttaaatattggtaaattttttccgcagacaatggtaaaacctgtgccagcttttcagctgtcttggttttattcactacatactcaggtttattcttatagttgatcgaagtcttatctaaaatcgcataaaccgtatacaaatgcgaatcttccgcaattgttaatccatttcgatcatagatagtccctcgcgtggccttaattacctgattgcgcttataaagctgcttggtacgctgtgataaattttgaccattaactgtcttggatattccgatatataaaaatctagccgtaaatacaagaaaaaccaaagccacggccatttggagaaatctccccaccgtaaagcggtagccgtgggctttggatttttgtaattttaaattactgttttttttcattaacgaatcgtcctaatatttttgttaattagagttaatcctttttcacgtgcaattttatttaaacgtgaagtagaggtcaactccccaatctcttgacgtaaatcggtaatcttattctgttccttagcaactgtttgttgagttctagtcaattcatgttgagccgaagttgcagaaatactagaagaaactagaaagatcatcatgcccaacgtaatgacgcttccaataatcatcaaagctttttctatgccactataaggaactttacgcggatcaaggataattcgttgtcgtctttgcgaaccatttctactacttggttcatattcaatttttcttgctgagctatcagccataacattttcctctttataacttctctgcaacccgtagttttgcactgtgtgagcggttgttgttctctaactcagaagtagaggctacaattggtttgtgatttaccaaacgtagcgttggcttcataccgtccggtataaatggcattcctcttggcacctcaacttctgaatacttcttaaaaatccttttaacgatcttgtcttcatgagactgaaacgtaattacactgattcgaccacctggacgcaatatcttaattgcttcctctagcgaagcttgtaaaacatcaagttcgtgattaacagcgacccgcaaagcttgaaaactcttctttgccgggtgccctccagtccttcgtgcatacgcaggaatcgcatctttaatcacatcaactaattcaaaagttgttgcaattggcttttcccgtcgtctttctacgattctgtgagcaatttgacgagaaaacttttcatcgccatattgatacaaaatatctgccagttctttttgacttaaagtattaactaactgataagcatctaagtcctgactttgatccatcctcatatctaatcgcgcatcataacgatatgaaaaaccgcgatctgcttgatcaaattgaggggaagatacacctaggtcatagtaaatgccatctattccatctgagtaacccagttttaccaggtccttttccagattactaaagttgtcatgtaccaattctaaccttggctcactatccagttgtaataaattcgcaaagttcaacttcgccgattttatcgcatattcatcttggtcaaaacctacaagcgtaccggtgtcaattttgctgagcaaatatttagcatgtccaccaccgccaaaagttgcatctacataaagaccaccgttttttggtttcaaattgtcgatagtttcgtgtaagagtacactggtgtgtttgaatttcatattttttatagttcaatgtcgtccaaattttcagcaatatcatcatagtcttcgttagcttcttcttcaaaactagtccaacgttcttttgaccaaatttcaattcgatcagagacaccaatgatgacacattctttaatgagtttggcatgcattttcaacgttgttgtcagattaacgcgaccttgcttatcaaactcacattccatcgcaccagagtagaataaacgcataaatttacgtgtattcctcttagtcaacggaagttttgctaatttagcttcaatcttcgaccactcctccatcgagtagccaaaaatgcagccttccattcctcgcgtgaatatcatcttgtcgccaatctgatcgcgaagtttcgctggtataatcaggcgacccttgctatcaagattgtggtgatattcacccatgaacatggtctagcccccttccactaaataatttaccacaattccccactctctaccacattcataagaaaaaaatacagatttttaaatttcttttttattgtgatttttcaaaataaaaaaaagtcacaaaatattgaaattttgcgacttaagcatatacaagtaattttattttataacactagcatcaataaaagtccgatataccagaaaacagtacaggcagtcaaataatcccataattttctaactgtttttcctaaagaaatatttttatttctaatcgcatcgttcagcgacacaacaatcactaatacaaaatagcataaaaaaccataaggtaaaaaagaaggtttattcatatgtaaagtaattaatccacaagctgaaagaaagaaaaatggcataacatcgtaccctctaaactgtgctttagggaaaattttattgataaaaaaagcaactactaagccaataattggaattaggaaaatataaagcataagtattcctccattctttttattctaaactataattgatttgaaaaaaaccgttaataagcataaaatattgttcaaataggagggctgtttatggcacgaaaaaagaaaaagaaatcaggttttcaaaaattaactattgcaatggcttggatcatggcaattattactttagcagctgttattgctcaagctgctatctcacttcaaagtttttaaggattaaaaagacgcgaaagaaaaaatccaatgtcattaagttaagacattgacaattaagggtgcttttttagagatcgaatcatttggattcgatctctttttttgtataaaataaaggcgaaaagaccagccttttcgcctatcttatatattatatattttaaaccttcaaaattattgccagaaagatggtgttaattatgaaagcccttcataagaatattctagaacgtcttgatcaaattatcaataatactggggatcatattcacgattttattaataatcctcatgcttttaccaggaaacgcactttagatgcagcgacagtccttaaaactacaattaacatgcaaggtcagaatttaaacagtgaactctttagagcttttggcgaagatgcaactaaaaagaacgataaagtagttagtacttctgcctatgttcaacgcaaaagccagctttctcctgcttgttttaaacatattctgactgtttttaatcaaaatctatttaatattcaactttttgatcatcactaccgtttgtttgccattgatggctctgactttaatcaaatctggaatccgaaatcgaataacattgtacaagcttcttctcataaaaagaaaccctattgtcaaattcacgttaatgccttatatgatctattgaataatacctaccaggattgtatttttcagcctaaatcagaaatggatgaacgcaaagcggctgttcaaatgcttaaagctttgaattgtggtccatatattgtaacaatggatcgtggctacactagtttcaatatgattgaaaactgcaatcgcctgcctaactgtcattacataatacgaactaaggctggacaaggcggagttaaagaaataacgacattgcctgatcaagaatgtgatcgtgagatttcctgcctggtaactacttctaactattactacatcacgcataaagccagtgagaatattcaccatgtccagcatcattatcgccaatatattaagtatcgctctaaaaatacccaggatctaagctgggattttggcgagttatgcacaataaaatttcgagcctgcaaatttagaattaatgatgccaaatcaggcaaagaagaatgggaagttgtgctaaccaatcttgatcgaaaaaattatccgctaaaaagaattaaagagctttatcatctgcgttggggtattgagacctccttcaagaaattgaagtattctttaggcagtgtacagttccattccaaacaagataaatttattgaaatggaaatttatgcccatatgattatgtttaatgcaatcagtcaaattgatgcacaggcctatattccgcaaaagcattgcaagtatcaatatgccatcaatttcaagcaatcatgcttgattattcagagcatgtatttggcttcttctttaacgcaagattttgaacggatccttattcagatcagctattataccattccaattagaccaggccgcaaggacaagagaaatattaagcccaaatcagctgtatattatttatatcgcgtagcttaaaaaagcagaatctgtgctatgccttatttgttgtacgaaaaaagcaccaatttaaccaattaaatgttaaatcagtgctttaaaagtctaatattaattgtcaatgtcttaacttaatgacattggaaaaaatcttccgcgtcttttttaaactcgataagcgtttaaatcaattaagaatggataatcctgagctaaattgccccaaatccaatacaagagaaaaaagaagacaactgcccaacctaaactgactaaaatgctcattaataatacgtgtgctgatgcagcactaatacccaccatattaaaaatgagccaactatacgcaacaaaaactgcagttcctaataaaacgacaattaatctagcccataacatttccggtaaaaaacgagctgttttttgacagatccagcaacttgcaggtaggaaaactgtataaacaccgataatgccataaaaatagatatcagcaacaattcctgcacctaatgctaaccaaatttcattatcattagtatcatcaaacagaccaatcaacattacactgattggcaaaatgacgcttgacgctgcaaagttgtcataagtcataaactgatgtaagtaaagtgcacatacaccgtctactaccaatgcaataaataagccaattgccaaaacccattttcgaaacgtagacattaattagccacctgtctttcaattacagttacaacagatggatcactaatatcacctgctggtttaattctaatctgatcagatagaccaaatgaatcacgagttgtcgtagtaactgtaccaattaacaagccttttggtgagttaccgcccataccactagtatatactctcgtgccggccttcagtttgcgaccatcaaccacctgtgtaaaggcaagataattattggaagtaactgtaataataccatgtactgtttttccattcgcagcatccgcttgaacagagaagcgattagccgactcatcagtagtagtaagtaattcaaccttggaagaagcagcatttgcttctacaattcgaccaataacaccgccatcgcacatgacagccatattctttttaattccagctgaacttcctttattaatcactaataaatctgaccatgtatcaggcgaccgagaaataacagaggcgttgaccatggtatagccacttaacgtatcttttaatttcaatgcagacttcaattgcctattttctttttcaagagctgaattgcgagccttcgtctggcctaaattagtaacttctcgctttagatgattgttttcttcttgcgtatttaaaatatcatgaacactatttaatccgcctgacacgagccctactggtacatcaacaattctagtacctaaagcaacgacatcgttacccaagctttgaatcagtaaaggtgtattgcgcctattgcgcaagctaacactcccacccaaaacggataaaataacaactactataataaatgctgataataactttttattttgcagaaattttttcattaagaattgatcctatagaaaaaccggcaacagccggcttttttattatttgcgacttctacgcattacttcaatattcttgagtgattcaccagtaccaattgctacacaatcaagtggatcttgagcaataaacacaggaaccttagttgcttcagaaataacttctggcaaattcttcaagagtgcaccaccaccggttaaaacaataccatgatcaataacatcggcagcaatttctggtgaagtttgttccaaagtctccttaatagctacgataatgtcttgaactacatcttgaatagccttggcaacatcaactgcttcaatatcaacagattttggtaaaccagttactaaatcacgaccacgaatattcattgattcaatttctttagccttttcaactgaagctgaaccaatttgaattttaatgtcttctgcagttctttcaccgattaataagttaaagtttgagtgaacatagttaacaatcgcattattaaacttatcaccggcttgacgaattgaagttgatgaaacgattccacctaatgaaattgtagcaacatcagtagtaccaccaccgatatcaacaaccattgaaccagtagggtccataactggaagaccagcaccgattgcagctgcaaatggttcttcaattacaaatgcttcacgagcacctgcaactctagctgcatcaattacggcacgcttttcaacttcagtaacacctgaaggaacacataccattactgaaggcttggaattaccaacagtcttttccataaaatatttaagcattgctgcagtagtatcgtaatcagcgattacaccgtccttcattggacgaatagctacaatgctgcctggtgttctaccaatcatttcttttgcttctgaaccaacggcgattacttcgcctgtttgtgtattctttgctactactgaaggttctctaagaacaatgcccttaccttccatataaacaagtgtattggctgtacctaaatcgataccaatattctttgtacctaatccaaacacaaaaatctctccttaactgttgcggtctctaaatcttgactaattatagcatactataactttaaaggcgcctttcacacaaattttaaagaactttaaaacaatttttctcacgcaaacttaaatattgaccttctcccacgataaaatggtctaagaaatcaattttcatcatttttgcagcttgacgtaaactttcagttaattccaagtcacttgcagatggcgttaatttaccactaggatgattatgagcaataaaaattccagagcagccataaataactgcccaccgaaaaatttcccgcggatgagcaattgatctattcaaagtcccttgaaatagtttcttctcagcaataatgtggttgctattgtcaatatacaatgcccacaattcttcctgcttgtgtcctatcagcttatcagctaaatacgtacctacttcaatgctagatgtcaaaattgtctttctcttaggtgaagcgcagcgcaaacgatctagtactgcctcagccgtaatagcaagttcatccgagcattctgaactggtaataaactttaatagatcattaaacgaatttaaccctgtgtttttcagaaaaacatttaagtcctgcaacgtatgaattcctttattttctagttgttcaaataattgtgtcaatagctctaaatctgttttgacaaagtaatgatttagttttctttttaacataaaatccccctcattacttattacgcaaaaaagagctaaatttttttcagaaattcaaaaaagttttgacaaatcatcgttgcattctgcttatctttaacagatggtgctttcaaatctggtaccatcacacattttaaccctgcattagcagctgcttgaacaccggttgatgaatcttcaaaaactaaaatattttctttaggtaaattcattttcttagctgcttctagataaatatctggtgccggcttagccttaatgtgacctctttgtacatcaagataactaagatgaaaatcaaaataatttctgattccagtcacccacatagcatgctgaactacattttcataattacttgaagcaatcgccatcttcaagccacgcttttcaaattcgtctaatgcttcttgaacaccaggttgcagctttaactttccctcatcagtccattgccacaccaagtcatcagttcgcttaataaaacgatcacggtctgcttcagttttaaaatatttatgataaaaatcctgcatctctttaactgtagcaccagttaacttgagataagcatcccgcggcgtgcccaaattctcttcttctgccgcctgaatattagcatcccaatacagcttctctgaattaactagcaaaccgtccatatcaaagataatgccttgaatatcatcatctagcccttgtacgcgcatcacgttttcctttccaatttaaaatagcactaaccaaataaaaggatccactaacaattaaaatatcattagctcccaagtgatctcgcagctgggtaaaagcagctcgataatctttttcataattatatcttttttgtacatcaattggaaaatcatcttttttagctactcgcggataagataaagttgtcagtaaaacttcatctttatcatcaaacaagctaaacacctgctcaagatccttatctttcatcatagtcactaaagcataaagcttgccatgcttttgctgggtcatacgatgaacgactgccagcaaattactcattgcctgaatattatgtgctccatctaaaatgattagcggattttctcgtaaaatttgatagcgccctggaataatcgtttgattaatcgctgtttcaacttcttcatttgataaaggcagtttcaacaaaaagaacgcctggcaggcaacggcaatatcataggcttcaacttgtggtcgtaaagcaaaaactagctttcttttgtgatcttgataaacaatttgattatcaagcaaaacactaaagtctcgtcctaattgataaactatcgcatgttcttcttcggctttacttttcaaaattggccaaacaacttctggcacgttacctaaaactactggtctttttgccttaataatgccgcttttctcacgtgcaatatcctgaattgtaggtccaataattttttcatgatcgagaccaattgtagtaataacacttacttctggcataattacattagtcttgtcatgttctccaccaattcctacctcgataacagcataatcacactttttttgagcaaaatagacgaaagccagtgcgacttcatattcaaaggttactaacgaaaaagttgagtcctgctgctgcaatttctcataagtaccctgcacaatattagctgttttaactaaatcctgatcactaatattttgattatttaactgtattctctcattaaattcatagacatacggtgagacaaaaaggccagtcttttgaccagccttttttagtaggtttgataaatagtatgaagttgaacctttaccattagtgcccgtaatgtgaatcgttttaactagatcttgaggattgcctaattccaacaataaccgcttaataaaagacaaattatttttaggatgtaaatgaggcaaagcatataagtaatcgattacttcttgagctttagtaaatttcaattatttactctctttcaaatcttgaattctttcacgaacaccggctaattgactttcgtagtcagccttcttttccttttccttgttgacaacagcttctggagcgtgaccaacaaagcctttgttagccagcttcttttcacaacgagcaacttcgtcttcaagacgcttttcttctttttccatcttttctagctcatcgtcaacattaacaagttcagttaatggaacaaaaatttgtgcgcctggaattacagcagtcttagctaattttggtgcttcaacttcactagctacagtcaattcctttggatgtaagaagttttcaacgtaatcagcattttcgtccaaaacgcgcttgttagcttcatcgtctaattgaatcatgatgtcgatttgacttgacattggtgcattaacttccatgcggatgttacgtactgctttaatagtttcaattaagaaggccatgtcttgatctgcttgcttgttttcaaattccttgtgagtagttggatattcagcaaccataactgacttaccttcatgtggcattgaaagccataatttttcagttacaaatggcataattgggtgaagcaaacgcaagatttggtcaagaatccaaattaagttttcttgctttcttgcctttaattcttcatcgtcaccattcaaagcaaccttagaaatttcaatataccagtcacagaagtcattccaaataaagttgtaagcttcacgaccagcttcaccgaattgatattcatcaaacaagcgagttacttcactaacagtatgattcaagcgatcgaaaatccaacgatctgataaatcaaatttagaagcatctggcatatgagctggtttagcatctgctggcaagttcatgattacaaaacgacttgcattccaaatcttgttaatgaagttccaagcagcagataatttcttaggatcataacgagtatcttgaccaggagcagtaccattaagcaagaaccaacgaagggcgtcggcaccgtatttatcaactacatccattgggtcaacaccgttaccaagtgatttactcatcttgcgaccttgttcatcacgcattaaaccgtgtaaaacaacatcattaaatggacgcttgccagtaaagtgcaaactttggaacatcattcttgatacccagaagaagataatatcgtaaccagttaccaaggcattagttgggaagtagcgcttaaagtcttccgcattagtatcaggccaacctaaagttgaaaatggccataatgcacttgagaaccaagtgtcaagtacgtctggatcttgttcccagttttcaatgtccttaggtgtttcttcacctacataagtttcaccagttttcttattgtaccaagctggaattcggtgcccccaccacaattgacgtgaaatacaccagtcgtgaacatcttccatccagtgatcaagagtttgttcaaatcgttctggaacaaagtttactttgccatcagtcttttgattttccaaaactttgtcagcaagtggcttcatcttaacaaaccattgcttagaaagacgtggttcaacttgaacgccagaacgttctgagtgacctactgagtgaacaattggttctatcttaatcaagtaaccttcttctttaagatccttaactaaggcttcacggcattcaaaacgatccataccagcatacttgccagcttcttcgttcatcgtaccatcatcgttcataacattgattctttcaagattatgacggttaccgacttggaagtcgttagggtcgtgagctggagtaatcttaactaaaccagttccgaattctggatcaacgtgttggtcttcgataattggaatgtgacgaccaacaagtggcaagatcaattctttgccaacaatatccttgtagcgcttatcaccaggtgctaccgcaacggcagtatcaccaaacatcgtttcaggacgagtagtagcaatttctacataacctgaaccatctgcaaatggatacttaatatggtaaaaggcacccttatcatctttgtgaataacttcgatatcacttaaagcggtttgaagtgctggatcccagttgatgatgtattcaccacgataaattaagccttcattgtaaagctgaacaaaaacctttttaacagctttagaaagacccttgtctaaagtaaatctctctcttgaataatcaagtgaaagccccatcttagcccattgacctttgatgattgatgcgtattcatctttccaatcccaaacctgtttaacaaaagcttcacgtcccatttggtgacggtctttgccttgtttacgcaattttgcttcgaccttagcttgggtagcaataccagcatggtccataccaggaaggtaaagagtatcatagccttgcatccgcttaaaacgaattaaagtatcttgaattgcagtatcccaagcgtgacccaagtgcaacttaccagttacatttggtggtggaataacaattgaatatgggtgagcttttttgttacctgatggcttaaataaatcttcatcaagccaggtttgatatctacctttttcaacctcgtttgggttgtatttaggtgctaaatctgtcataaaattcctccaataaaaaagtcctagacatattgtctaggacgatcagttaaaccgcggtaccacctacgttaagcatgtatcaaacatgcttctcttgaagacgataacggcgtataccggattaacctactttttattttcaattaatcagctaatcaagctactagtcaaccttcggcctctcagctgtctggcttttctctgttaataaagtcgacccctcttgattcttgctttggttatgattatagcatgaacttcactcagaaaaaagggttaggaattagtcgtaattaagttagccatatgtctttattcttttaataaatcagcaatacatttttccgatgaatgatattgcttatattgttttaacacgttgattaaatcatcatagtgactattccaaaaataataattttcatcataagatttcacactcttaagatcgttataatactgcttaacaaaatcactaggcttcactttacttttatagttatttgtatatcgctgatagtcttgatgataaagaatgtctagaatttcaatctcaggtctagtacgaagttctactacttcggatactttctttttatacacttctggaagattaaacttttcggttttggaatcaagtatcctataaattttaacctttctacttctaaaccctttattcaaaaattctttagcaaactttttagcatttcgtgctctaattacttcaccttcaagaagatcatcctcgttgaattttagtgcatcgtgttccaatagaacttccataattgctcgttcagtatgaccttctacaataatagcgattagatctgtagagttactcatccattttaaccgccttttctgtagccttctttaaagccatgtaggcatcataatctggagctgtcccacctaaataatctgattcaaaaacatcggctttatttagatcgcttcttacatcagcagttgaatatctttgaagctgaatcttgccttctctcttagtaatatattcttcatcagttctttcaattttatccaaaatttcagtatagtgcgtactaaataccaaagtagctctatttatgttgattttaggattagtaaaatactcaataaaagaatctacaatagcgtgattaaagtgattctccaactcatcaataaagatgatgccaccaacggaaagtgcattaattacctcgccataaagagttatccctttagctgtaccagaagacaagtattttgcaatcgttgtaaaatcattttctgcaatctctgtatctttccctttaaacttcagcttaaacaattgtttagtagcaccagagccctcaggcttgttttcaattttaagatattcaattgttggatctaaaaagtttaaaatttctccaggcacattgccagaaccatacatcaatgcattaaagtcagtaaagaacaaagtatcaaatggtatttgaggataatacttatttttcgaaataatcgctctaaaaatcgaatcatcagacgacaaaattgaagaagctaggtcgcctaattcttttctgtctaattctggttttatatttttgaaatcaaataattttttctttgaaagattaacagttaccttttttcgatataccgtttcagactcaatatgccagcttttacttaaagttttctttaacttgaaaactaaactatccttataaactacatgatcagttccataaaaataagttgtaacactaataggctcatttcctattagcacatccgttagcttagtttgatcaattgacttttccatcacaactgtttgaagaattcctatcaagagtttcatgatcgtagtctttccagtagcattagtccctactagagtgattaaattattcacccataaactgccgagcaaatgagttaatcgatcagaggtattagaagtaacccttgcatcactgaccagtgaaaattcaagatcatcctcaaatagcggatgattttgaatttctaattttaaaaagtataatttatttttattcataattattcacctaaaattgttttattcaggctaaattttatcatatttttgcattttatacataaaatctgtttaaaatataaataatcctcatcaagtagttactacttcatgaggattatctaaaatattctactttctaatcatcttaactgcttgaatcaaaatcgttggaatcagagccaagccagcaagccacattacttcttgcccagttaacggagtaactgcaaacaagctatgtaacgccggtacaaacaaaatcaaggctaacaaaattgttccgacagcaaatgctgctaaactgtaccagttatttttgaaaccgatcttgaagatactgtgttgtgaacgacaattgaagccatgtaaaagccgagcaaatgtcaatgttgagaacgccatcgtcgttgcaactgcaggactatcttttagtccgatcaaaaaggcagcaattacactaatcgaaatcaacaaaccttgaatagtaatttgactcacaaaggctttgtccaaaataccagccttaggatcacgtggcttacgtttcaaaatatctggatcacctggctccattccaattgctaaagctggaagcgaatcagttaccaagttaataaagagcaattgaaccgctacaaatggtactggtaagccagcgagtgaagcaaataaaacagtgataattgctgaaaggttacctgataacaagtagccaatagcgtttttaatattttcataaactgttctaccgttagcaacagctttgataattgtggcaaaattatcatcggccaaaatcatgctggcagcatctttagatacttcagtaccagtaatccccatcgcgacaccaacatcggccttcttcaaggctggtgcatcgttaacaccgtcaccgatcattgatacgatacgatcttttctctgccatgcattaacaattctgatcttgttttcaggcgatacacgagcataaaccgaaatcttctcaatgttttgatcaagttcttcatcgctcaaagcatctaattcaaggccagttaaagccatgtcaccttcattgaaaataccaattttcttagcaattgcaacggcagtcaccttatggtcaccagtaatcatcacagtcctaatcccggcttccttagcacgagcaactgcagctacactttcttcacgtggtggatccatttctgaaacaaggccaataaaagttaagccatcttctgcttcagtagaaagctcttcatcactttctttataagcaaaagccaaaacacgcaaaccattttctgaaaagtaattgttttgtgccaaaatttctttacgatcttcttcagtcattggacgaatttcatcgccgaaacgaatattgacacagcgtttcaagagcacatcaattgcacctttaacaaaaatagttggtacagtatgaatcaaatgcttagtactcatcagcttacgatctgagtcaaatggtacttcttccagacgcttagaatgttcgcgtaattcttgttctgataagcctaaaacaccattacctaagtcaattccgggcacttgacgatacatttccagcaaggctgactcagtcggatcaccaattgccttatcttcggccaaacttgcatcgttgttaagcactacatcataaagcaagtagcggtgaagttgattactcaaatccagctcatttggctttaaaactttaccaccaatatagatgtcctcaacagtcatcttattttgagttaacgtaccagtcttatctgaacaaattactgatacagaccctaaagattctacggctgccaagtttttaataatagcattttctttagccattttttgcgtacccattgcttgcacaatagttacgatagaactcaaagcttcaggaattgcagcaacagctaaagctactgcaaatagcagtgaatcaagcagcggttgaccacgccacatttgaataccaaagatcacagcacacaagattaaaatagcagtagccaatcgtgatgaaaactggtcaagtgatacttgcagcggagtgcgacgttccttagtttcattcatcaaggaagcaatcttaccaatttcagtctgcatccccgttgccgttaccacaaccgtagcacgcccataagttactaaggaactggagtaaaccatgttaacccgatcagctagcggcacttctttttcaaaatcagtgtccaacttgtcaacattagtcgattcaccagttaatgaactttcgttgacttgcagagaataattttctaaaattcgaccatctgcagtaactaagtcacctgcttctaacaaaagaatgtcgccaggtaccaagtccttggcctcaatctccattttttggccattacgcaaaactttagccgttggcgcagataatgactttagcgattctagcgacttttccgccttaacatgttgtaccgtacccaaaatcgcattcagaatcaatacaacaataattaccaacgtactttccagactgcccgtaaaagcagaaattattgccgcgataattaggatgatcaccattaagtctttaaattgttctaaaaagacctgaaaagtaattttcttctttccttcaactaaagcatttggaccaacttgagctaatttctcttgagcctctttagcgctcagcccctgctttaaatcggtatttaactctttagctatctcgtcttttttctgacgatagtattccatgtaaagccctccctaaacataagagtaatttaagcaaaaaaatagagactactggctaaaacactgtttagtcaatagtctcatcatttaaacttacagcggaaaataaatttcgttctgacgccgtaaatacaatttatgccgattactccctatttacttgtacataattaaaccatatcaagtaggtagttggcaagctattttaactttcttttaggaagttttctaattgttcatcggtaaaatcagaaccgtaattttgttcaaggagatgcatgatctcttgcttggtattaccagttcttttaagtgaagaaactaaaattttgacgcctcgtttaagtccctcttctttaccttcctcacgtgcgtcttgttctcgctccagtattttctcttcgtagtccatgatataatcactccattccgagcaataagataatcatttgtacttcttatctttcaataatccgttagcaatatcagccgaactaactggtacaccgactaaacgctcatttttccacaaatcaaaaaaatcagctggcatcatttgatcaaattcatcatctgaattcattaaatccttataaacacgtgacttctcaaataaatttagagcctgcttaggataaatgtttaatctcttagcaattaagtcgctaattgcttcagctagttgctgatgaaattgcttttcactaatttcgggaatcatctaaccaactccttatctatgaacgttaaagctttgagagctctttctgtcttgaaacaatactgctccgaataaacactcggttttaattttagcagagcctcatctaaatctagattaccatgtttccagcaattaacaacagaaaaaagtttaccatctgctgttgggccaatgacgatatcagaattatcttttatattattcattctattttgaatgacaaacttaatccaatcaatatctgcttggtaaactaatattttcaagtcgggttgatcagcatcgaatacatatctatttaatgtcggttgacctgaatatctagccttacgctttgcccatttttctgcttgtctacgattagcagtcacataaaagccattaccaaaatcagttgtaaaaacatttttatttatacgaggctgataaacagcctgattgcttccatgatacaaaatgactttggtattgcttttcatgaatcgtgatgtatgcgtatttttcatcgcgcacctctttcataaatagtaggacaaaattatcctccactatttattacgcaaaaaagcacgatttttttgtgagaaattaaaataaaaaaagaaaatgcctgagaattatatcccagacattcaccaatttacggctctttctcatttctcttccttcacaatataaattggtcgttctttaacttgtaaatagattttaccaatataacggccaataattccgatacacaaaagctgcaaaccgccaatcaataaaataattgaaattgtgctggcccagcccaaaatacttgaaccaggaactattagtttacgaacaattacaaaaataagaccaataattgacaaaatgaatgaagttatcccaatccaaacagctaagttaagcggtgcttgagaaaaatcagcaatcccgcccaacgcatatttgaataatttgtgagtcgtccaatcagtttcaccagctacgcgctcgacattgtggtactcaagatacttagtcttaaaaccaacccaagcaaaaatacctttagaaaagcggctgtattctttcattgataaaactgcgttaaccatctgcctggtcatcatgcgatagtcgcgtacgcctgaaacaatttccactttagaaatgcgattaatcaccttataaaattgattgctcaagaaagacttaaacttaccttcccctttacgatctactcgtctgcagccaactgcatcatagtcaccagtctgcaaaattttatacatttttggtaaaagtgaaggcggatcttgcaaatctacatccattaagacaatataatctcccgttgcagctgataggcccgcatagatagcggattccttaccaaagttacgagaaaaagaaatatagtgaacatgtttgtcctgctcatgcaattttttcaattcggtcagtgtgttatcattggagccatcatctacaaaccaatattcgggcgtcactttgggcattttagctaatactttttgcactgctggataaaaaagtggaattgtttcttgttcattaaaacaaggaaccacaattgataatttttccattagatttcttctttcttagcttttctaaaagtaactactttattaattacaaattgaattaaagttgctacaaaagttgctactattttaacgattaagtgcggataacccaatttagtaacgaaaataaatagggaaaccgtagtaaataccgtggtaatctgaccaacgataaaataagaaataaatcttaatatcatgcgatcatgaactttaaagttagtataagaattccataaaaagttattgatgatcccgcaggtagacgaaataatgttagctatttcaacattcatcttgaaatgcgtcaaaattgtataaattccaaaatcaacgactagccctaatacgccaattagaacatactttactaattgaacaaaatcttctgaatagattgctgttttgattttttccataattattcctaataaaaaatccagacaagaggtcctggatttcaacatatttaactaatatggtcttaattatatcattgtttttaagctctacgttttcattattaaagttaaaactttaataggaacaccttttgcattaattataatttttgtcattcaatctatctgtcttgttagtatcctcatacaaatgataggaactcttaatcttatgcctgccttgtggatcaaacatgcagagaaagataacatagcaacactttaaattttgatatgtgctgcatttcaaaatcatacagatttccatcaacatcctcaaccaaaatatcgagaataacagctttttgcttagggtgtttgggatcagcgacctttctctgcttctgcagataatgaatatctctaatctcaatctccggcaccagtccctgtaggacatgcttgcaaaaattcttgttagacataatctcaccaaagattacatcctctgtgaagccaaaccagggcttctttttcttgtgcgtattttccattgcgcacctctttcataaatagtaggacagaattatcttccactatttattacgcaaaaaagtgcaatttttttgtgagaaattgaagttttttaaagttttacccaactatatcttccaacttcaattccagatattctccccgctttaagttagcaggcaagcttaactttcccatcgaaattcgctctagctcaacgactttcatccctaccgcaccaaacatacgcttgatctggtgatatttaccttcacaaattttaatttcagttgtagacctatcgtgctcttcatcctgggataatatcttcaattctgctggctgcagtttggtcccatcgcctagtgtcattcctgaagcaaaagttttaacagttgcatcattagctacaccagcaatttcagcacgataaactttatcaacatgcttaccaggtgcaagcaattcatgattcaactgaccatcattcgtcaaaaggagcaagccagtagtatccttgtccaaacggccaactggcacgattccttgataacggtcctgcggtgcaagcaaggaaatcaccgttggctgattgcgatcttccgtcgctgacaaaacacctttaggtttattcaataagaaataatgatatttttgataagcaacagcatctccgttaacggtaacctgatcgctttctttaacttgctgctttggcgttttaacaatcacatcattaaccgcaacaattccttttttaattaattggtgtacttcttttcgtgagccaacattcatattggccaaatatttatctatgcgcattatgtctttctttcgttcttatgtgttgattaatattaattatataagaaagttaacccaatttcgaattgcgacactaatcaaaaacggtcgattttgttttcgaccgtttttacgcgcgttttgcgcgcgattatttgcttaaaatatattttgtagctctgccttcacccattcttctaatataaccttgtttttctagttgccgcaaaatcttcaaaactttcgtcctaccaaacttactcatttggctaatttgcttcgtagtatccgcaccttcatgaattatttgatatactttcttttcatcattagacagatcgtccgtaataaattttaaaactggcaatattatctttatcgaattatcaaaaatttcaaactgcggttgaaccaaactacttctataagaatcatttattcttcttacacctgtaccaaattgctcaattaatcctaacctaaagaaaacattagcaataattggattacgcaaaatggaaatctgacctgaaagatattcttctttgctaagtccttgtggcaatccacctggagatactacttcaattctgtcatcatacatagaaattttaatttgcgaattaatgttccaaactcgatgaactaaggcattggctattgcctcacgaaaagcttcttctggaatctgacttacaatatttcgcgttgctccctgtatttcttcatgttgataatattgacgatatttttgaattgcttgcttatactctttaagaatagattcatgctcataacttgctcgatcaagcataatattaatgctttcaccaaaccgaacaatatcaattccacgataattatttttgtctgccaaaagctcaccggcattagtgtaactagtatccttacgctctaaattaagcgtaatcaatatatcagatgttaaacttttaattcctatcttttcttttaatgcttcttctaaaatgttaaatgacaaattttggttcatcgcggttaaactatcataggttctattttcaccaattaagattaactgtgataattcagatcggtccacttcgatcgaagcactgtcattactcttataggcctttgatttgtataaatatggaggattaactccttgctttactgttaaagtaaccacattagttttaggatcaatttctaaattataatctggatttggtttgatcgaatcgttgattttattttcaacatttaaacaaaattcaactggatttttcacaccaacgattgatccatcatcctttattccaaatttaattttgccactgccataatttgcaaatgcactaaccgtttttagaaaagtattcgtcaatttctctttaaattctaaatttttggtttctctcatttaggtcaccgtttctaaactatttagttataattatactctttcacgcgcaaaaaaacggtcgaaaacgaaatcgaccgtttttacgcgcgttttgcgcgtgcctattatattaactttaaatcaatacataatactactagaagtttccatattaacaccatatctttctaaataattaaactgtatcatattaaatttcaaaaacaccagtgaaattaatcctctataacaagtcagcgtcttcttgagctttatcatccaagaatttttcatttggataaattggcgtaatctcaataccagccattgccctttcaatcaggccttcaacgtcaagacgagcttcatattcacgcgctttttccaactttggcttagtcttaggacgcggtggagcaaaaattgtacaacaatcttcaaaaggttgaattgataaatcaaaggtaccaatctcttcagctttggcaataatctccgttttatccattgttgcaactgggcgaataaccggagtagtagttacatcattgatagccaccattgattgcaaagtttgagaagcaacttgaccaactgactcaccattaaagatagccaagccgccacgttgtgcacgaatgcggtcagcaagctgcaacataaaacgacgttgcacagtcatcaaatagccttctggcagtttttccttgatcgtttcttgaatttcagcaaacggtacggcaataaaattaatcttaccagcgtagtttgccaaaataccagtcaattccttagccttagccaatgccttttcagtagtgtaaggtggactaaagaagtgaaccatttcaatatctactccgcgcttcaatgccagccatgaagcaactggggaatcaatcccaccactaagcatcatcacagccttaccagcagtaccaacgggcatcccgccaacaccatggagcaactgattagaaatataaacggcatcttgacgaacttcgattctcaagaccaaatcaggatgcttcatttcagccttcaagccatccatatgatcaaacaagtagtcaccaactagattattcaattgattagtgtcgtattcaaacttgtggtcactacgcttggtattaaccttaaaagtcattcctggcttaaaagtctcttgcatcaattccaaagaagtcttttcaatatcttcaagagtcttaggaatcttaattgctggtgagtaagtttgaattccaaataccttcttcagacgttggtcaacatccttgaatgatgcgccattcaggacaatgtgcatccgatcatgacgaggatgaaattcaatttgtgggaaatccttaagaactttttcaacgttacttgctaagcgattgatgaagtcctttctgttcttccccttagttgaaagctcgccatagcgaaccataacttctgtgtattccattaattttctcccaaatgattaattttagcaaaatgattatagatcttgtcaaagaccttaataaattcatccgcttcttgaagcgtattcgtctcatcaaaacttaaacgaattgcactagtagcaatcttatcatcaattcgcatagaaaccaaggtgctagcctcatctgccgtctttgatgcacaagcagaagtagttgaagtataaatatcttgatcttctagcgtatgaaccaaagtttcgccccgaattccctctaaagcaaagcaaagaatatgtggtgcaaagccatcgcttactggtgaaaaaatattaatccctggtttatcttttagataatcaacaattttagccttaatttctgcttcacgcttggccttttctggttcatcttctaaaagcaaacgaattgccttagccattcccgcaattgcaggcaagttctcagtacctgaacgcaagcccttttcttgaccaccaccatcgtgtaatggggtcagcatcttgccttcttttttatataaaatacctataccacgtggtgcatggaacttatgcgcagataagctcgagaggtctactcttggtgtaaaaaccttatcccaaatatttttgccaagtgcctgaacgttatcaacatggaactgaatcgttggataattttcaagcaaatcgctaatctcatcaattggttgaatggtgccaatttcgttattaacgcccatgattgaaaccaaagttgtatcagaatcaatcgcgtttcttaagtcattaacgttaactcggccttccttatcaactggcaatctggtaacgcgccaatccaaattctctaacgcgttaaaactattggctacagatgcatgttccacgctagaagtgataatatgcttaccaaattcacgcttttgaattgcagtccccttaattgcggcattatttgattctgttccaccagaagtgaagaaaatttcatgctgcttagtccccagcaaatcagcaatttgtttacgtgacgcctcaagcaattggtgtgcacgatcacccatcttatgcaaactcgaaggattgccccaaatattagtcgctactttattgtaagtatccaatacttgtggatctatcttcgttgttgcactattatcaaaataaatcactatcattaccccttcatttaaaaaacggtcaatcgcttgaccgtttcaagacttttcaattttagcttaaataatgaatcgcttcaattaattactcttctcttctgaataatatgcattttcaagtcgttgataactacctggctctaccttttcaattgctgtagcaattgtatcaagggcttccttatagttatattcattatatagctgcattgctgtcttttgtgcttgcgcaattgaatccttatctgcatatttatttgaatactgcatcgtcaattcaactaggttagcggaattaatgatgtcatctgcttcacgtttaagccgctccacatcatcagaaatttgaattaattcagctgagatcttttccatattaatccggacctgacttaattcgttgctgacatgaccaatctcgttgactaccaaagtgtacatttggacaaagctatcaggattgccaggcaaatttcgtctttcaagtcgacgataaactaatgaaacttcttgcttaaagcgcttgattgaatcattagctacattttcagaatcataaagtccatcaacgtcagttgacatcttagcctgctctgcatcaatttcacgcaggcgatctagcatctggagccatgaatcttgaatagcagagtaaacacccttaccatctgcgatattctgtgtatcaatagtgtactgatggtacatttcattgacttctttttctaagtctttactcttttccaattcgccatgagtcaattcatagctctcatcaatatgccgcaacttttctaccagtttctttgacgcggtttgctgatgtgagatcaaagtcagcattttactttgatttttttcaacaaatggtcttgccttgtattccttagctaaaacatcatacaggtcgtcaatttcgccagagatctttttattttccttggctaattcatccaccttagtctcagctagcaatttgcgcgcaccatcaatttcatcatgaatttccttgattctgcccaaaacatctacgctagtaaggtaatatttttctgaaatcatttttttataagcatcagacaattccttaagctgatcttggaacactacttcaagctgatgataaccctcttttagcggttttaagcgtttttgtaagttacccaaagacatccgaatcttggacaaaactcgcttagcttcaacatgatcaccttgtgaagaaagattttttgcttcttcaaagtcactctccattgatgctagttgatcttcaacctgatcaatcgcagcaccatattcaaaggaattggctaagatatcttttcttaattcacgataaactttaatcaaagcatcatattgaatttgattttccttatttgattcaagtagttccgtgaaaactgccttggtgttacgagcatcttcgagcgttggcttgataatctcctgtgcttgtttaatattctttcttgctttaaacaagcgataagttgcattttcattagcagcttcttcaactagcttatgcactcgcggtaattttttcttagctgcttcagtgtagctcttgcgccaagtatttaatgtagttaaactttcgccggccaaatccattttatccagtcgcgtaatatcatcttctagatgcatcttctcaatttcagtcactgctgcatcaatcgcttcaatttcttttagttgtttacgattgatcattagcattgctgcaactacgacaatgattaggatcaccacggcaataattataatagcttgaattgatgacatagtttatcctccaaaactatcataattataacaaaacctgaccctaataggtgcaaaaagctgttctattttcttgatttattattctgaactctatataatactattcgtgtaaaatatttgcagcaataagtgacaagaacgtcaacatcttgaaacgctttagtgaacgagtaacccgcgctgcattgggcgaaaatgtaaatccaagatgcacgaatgttgaacttatgcttaatattttactccaaaaattattgtttaaattttatggaggattttttatgtcaagatatacaggtccaagttggaaacgttcaagaagattgggtatttccctttcaggtactggtaaggaaatttctcgtcgtaactacgctccaggtcaacacggtcctaacaaccgcggtcgtttgtcagaatacggtcaacaattgcacgaaaagcaaaagttacgttggatgtacggcttaaacgaacgtcaatttagaactttgttcacccgcgctggtaagattcgtgaaggtcaacacggcgttaacttcatgattttacttgaacgtcgtttggacagtcttgtttaccgtcttggtttagctactactagagaacaagctagacaattggtaaaccacggtcacattactgttgatggcaagcgtgttgacattccttcatacgaagtcaaggttggccaaactattggcttgaaggaaaagtcaaagaacttacaacaagttaaggatgccttagaagcagttactgctcgtccatcatttgtttcatttgatgaaaacaaaatggaaggtactcttgtacgtttaccagaacgtgacgaaatggaaccagaaattgatgaagccttagttgttgaatggtacaacaagttactttaatttttacattttattttgtcgaaagtctttctcaatcgagaaaggcttttttctttgctacaataagtacataaaaagaaaggatgattagatgactgaagatttaaataaacgtgttgaacaagcagctcaaggtattactccacaaactaagcctgatgaacgccgcagatttttaggttcattacgtgagcgctgcttaatccgtatggacaatactgaagttaaaaatcctgaattaactgccctatttcttaaacatatcactgactttaagggctatactattttgatcaatggcaatatcactgatgatggcttcttgggagacattgaagccagttgcagcaaatatgatattcccttcactttagttaacaatgaaaccgcaaaaacaggaccacatgatacggcagtactagttgtagcgaaaaacgctatcaatcgaccacgaattgagctaaagcaagtttatccacctgagtttcctaaagaagaattagccgcacctaaaacaaaagaaagtttttggcataaactttttcacggagataagtaaatgaaaccattagcatatcgtatgcgaccaactaatttagacgaagttgttggtcaaaggcatctgattggtccaggcaaaattattcgccgaatggtggaagctagacttctgtcttcaatgatcctttacggccctcctggcatcggtaagacaagtattgctagtgctattgcaggctcaactaaatatgcctttagaaagctcaatgcagctactgacggcaaaaagcaattgcaacaagtagccgaagaaggcaaaatgagtgggacagttgtcttattgctggacgaaattcatcgtttggacaaaactaagcaggacttcttactgcctttgctagaatcgggacaaatcattttaattggggcaactactgagaacccttatatttcgatctcccctgctattcgttcacgttgccaaatttttgaattaaagcctctttctacagatgatgcttctcatgcaatcaatcgcgcattgaacgataaagaaaaaggtctaggcaaatataatgttgaattaacagatgatgcgcgtgctcttttgattgaaaaaggcaacggtgatttgcggtctactttgaatagtttagaattagctgttctttcaactaagcaagaattgcaagataaacaccaagatgatcaaaaaattatcatcactcaaaaagaaatggctgattcaattcaaatgaaggtgcaaaactttgatgcttctggtgatggacattacgatctagtctcagcatttcaaaaatcaattcgtggctctgatacagatgcagcgctgcactatcttgcccgattaattgaatctggtgacttagtctctatctgtcgaagactagcagtaattgcctacgaagatattggactagccgatccagacgcagctgaacacgctatagtagccatccaagctgcacaaatggttggcttgcctgaagcacgaattccactggctaatgcggttattgagttagctctttctgccaaaagcaatagtgccatttcagcaattgatgctgcactagctgatattcgaaccaaaaaagttgactcaattcccgccaacctaaaagatgctcattactctggtgccaaaaagcttggacatggcgtgaactacctttatcctcatgattatcaaaatgattgggtagcacaacaatacttgcctaataacctgcttcatgccagctactttgcacctaaaggcaattctaaaatcgaagctagatataaggcaacctatcaaaaattaaaacaaatgcagtctgataacttgcgcaataatcactaatctcgcgcattcaatatggttgacaagcacctgtaatatgcgtattataataagtgatctgagttgatcgacaagcttaaatgtataaagttgaccgatcaaactataagacgtgggagttggcaaataactaccgaatcggaatactgccttgttgcaggatccatattcgctgcgatgccagctaaaattttgaacattgcgggttcaacaagcgtcattatgctatgtttagtcaactcggatttctttagaatattaaaaaaggcggtctcaattgaccgtctttttctatagtggagactgttaaatggcaataaagattgtaatgattatttttatccttctcctactgttaacctcgtggtacatgtggcacagaaggaacggacattttttaatttatgacattggtggcgatccacgcttgagcaatattcttaagtggacttcagtcgcccttttagctgaaagtattttagggattattttgctattcatgggtaataaatatttaaatctaatcaccttattcttagcttcattaactattttggcttttggtttatcaattactcaaaataaagaataataattcactaatgacaagcaaaattttggtaaaatagaatatagaaagaggtgcttatatatgctttcacaatacaagaatattcaagttgcagttgatggttcaaaagaagctgacttggccttcagcaaggctgtagccatcgccaagcgtaaccatgcaacactagaaatcttacacgtaattgatactcgttctttccaaaatgtttcaagttttgattcagcaatggtagaacaagtttctaaagatgctgaaaagagaatgaaggattaccaagctcgtgccactaaggctggcgctgaagatgttcactactctattgaatttggttcacctaagacaatcattggacatgacttccctaagaagcacaatattgatttaatcgttgtgggtgctactggtttgaacgctgttgaacgtctgctcatcggtagtgttaccgaatacgtaaccagaacttctaaatgtgacgtcttggtatgtcgtactgaagaagttaaggatgctttgcaaggctaattatttagctttaataaccgataaaaaaatacctccaaaattcagatttgaatttttggaggatttttttaatgttatttctaaaaatcgccagccgtactgaacatgtaatcacgattatggaacttcatcgacaagattaatccaatcccaatcatgtttcccatcagagctgaaccaccctgagaaacaaatggcaatggaatacctgtcaatggcaataaatcaatattcatcccaatattttcaaatacgtggaacaagatcatcatgataacaccagttgcaatgtatgaataaaagacatttctggtatcgaacgagatttttaccatttgaataatcaggtataaataaatcaaaatcaatgctacacagccgacaaaaccaaagttttcaccaattaccgagaaaaccatgtctgatccacgaactggaacataaacgctagctttgccaaaaccattaccaaatagttgaccagaaccaatggctttcatactttgccataactgataagctcctgatgaagtatcaccagatggatcgagccaagacttaattcgttcaaattgatatgcttgaaagaaatgactcaacaatgattgcccagccgacgtagttactaatacaataaccccaatagctgctaaaatcaaaataccatataacggtacaataattttccaagaaatccctgatactaaaaccacgccaccaacgatggcaataaatactaacatagtaccaaagtcattctgtaactttagtaaaattgctaccggtgccagccaagcaataattttgcctaataacaaccaatcggtcttaatcgtgtgaccatatttatcattatgctctttgaccactcgagccaacatcaagataaaagctggcttcataatttctgaaggctgaaaagtaatcggccctagtttgaaccaacttttcgcacctgtatctgcagctacgcttctgttatataagaatagcaccgcaatcagcaaaaatattccgattccaaagaaaattggcgcaatcttaaacaactgttctgcatcaaactgcatcacaaccataataattgcaattgaaatcaagtaccataatgcctgcataactactgccctaacaggtgaaccaatatgactaggatcacctaatgcagcaacatagatacaatacaagctaattaaagccaagagtagcactggtataataatattccaggctaatcgatcgaatagacttgtttcattttcaacttttgccattaaataatcactacttatattttatttttcatgtaaggtaaagtatgaaagtaagtcattaatgctgctttcaagactgttagcaaacaaaatattgcttgtcttagaagtagtagcacgataacgcccctctaccttttcaattaaaccaatggactttctattaggaataacaacttcccacgttggcaaattctttcccttaagttcattaacttcaatatcaatattctctaattttttagacataaatcctcctacttgctatccggatgaaattttgaagcaataattggatcttcatatctctccggatgtggatttcgaaaaatagtaaaattatcaggaactggatccactccacccttgataaatgggttacaccttagtatacgacaaattcccataatcagccccaaaataggaccatgttttttcaatgcatcaatcatgtaattggagcatgttggataataccgacaacttggtggtagtaaaggtgaaatcactgtctgataaatacgtacaataaaaatcaaaatcttacgcaagtaatctcctcacttagtgtcgttgatgcttttcaatatttttaagcaaagtacctgttcctaaagcaactgcttctaatggatgatcagcaattaaaactggaacttgcaaataataagaaatcaacttatcaatattctttaatagggctccaccacctgttagcatgattccgcgatcaataatatctgctgaaagctctggtggagttgtttccaatacttctttagctgctgcaatgattgacatcaagcctggttctaaagccttttgaatctctggtgcagtaactgtagtctgcttaggcaaaccatcaactacgtcacgaccacgaacagtaatttgttcatcttggtctggttcaaaggcgctaccaatttcaatcttaatttgttcagcagttctagaaccgattaacaaattatgcttactcttaatgtaactgatgacagcctggttcatccgatcgccagcataacgtaatgattgagaagttacaatttcacccattgataaaactgcaacgtcagtggtacccccaccgatatcaatcaccatattaccttgcggtttaaaaatatccaagcctgcaccaacagccgcaactttaggttcaaagtctaaataaaccttgccgccaccagacttttcagctgcctgaataattgctttttgttcaattgaagtaactccagtaggagcacaaatcaaaatatttggcttggacataaagccttttacatttaatttttcaataaagtaagacagcattgcttcggtaatgtcaaaatcagcaattaccccattcttcaaggggcgaattactcgaatattacctggagttcttcctaccatctcatatgcctctgaaccaactgcaactaccttgtttgtatcggtatttacagctacaacagaaggttcatttaatacgatacctttaccagagacattgatcagtacgtttgctgtccccaaatcaattcctatatctcgtgccacgataaccctccataattattcaccgtccattttaccataaataatcatgactttcctttactgtccttgttttaacacaatctttaaaacaaattactcaattgcattgaagtatcgataaaagtaatgacaaaattgccaactaaaaagcctaagccaattgcaataaataaatataataattgcgtttcaaaaacatggcctttacgaataattttatctagttgaattgctttaactgcttgaaaagataagccaatcgcaatcaaatatataatgatactaataatgacatgaacgcctaattgaaacatatattttcctcaattttgacaaaaaaagacggatgcagcattttgtgcattcgtctcttccttcttctagtgacctttagtgttgtacacgctaattctgttcattgctcgtcttaaagcaacttcagcacgtgccatagtttgttcgtcatgtttttcccgtgcttccttcaaacgttgctcagcgcgttgcttcgctgcctcagcacgagaaacatcaatgtttcttgcgcgttcagcactatctgcaataatcgtagcaacattattcgaaaactcaatatagccacccgaaatcgcaatatgatcaactactgaatccatttcacggcttcgcttaatcttaacctcactaataactagtggagttaaaagtggtacgtggttatacatgattgaacgttcaccatcaacggcacgtacatcaacgatacttccacgatgtgaataaatcattccattaggagttacaacatctactttaaaaagcttctctggatctgccatttgacatcaccctacttttctagtaaagctttagcttctggatcacttggagttacacccatttcttgtgcttttttcaaaacatcttcaattgggccgacaccacgaaaggcatcttctggtaagtcatcaagatgaccatccaaaataagcttaaagcccttaatgctttccttaattggaacatatgaacctggtacaccagtaaattgttctgcaacaaagaagttttgtgacaagaagaattggaccttacgtgcacgtgcaacgatcaatttttcttcatcagacaattcatccatacctaaaacagaaataatatcctgtaattcatggtaacgttgtaaaacatgttgtactcgagtagctacttcatagtgttcttcaccaacaacttcagggtcaagggcacttgatgaagattcaagtgggtcaacagctggataaataccttgttctactaagctacgttccaagttagtagtagcatccaagtgtgcgaatgtggttgatggagctgggtcagtatagtcatcggcaggaacataaacggcttgaattgaagtaattgaacccttcttagtagaagtaattctttcctgcaattgtcccatttctgttgctaaagttggctgataaccaacggcacttggcatacgaccaagcaaagctgaaacttctgaaccagcctgagtaaaccggaagatattgtcgataaagagcaacacgtcttgaccctcaacatctctaaagtattcagcaagtgtcaaaccagttaacgcaacacgcattctggcaccaggcggctcgttcatctgaccaaataccatggccgttttacttaaaacgcctgaagctttcatttcgaagtaaaggtcgttaccttcacgagttctttcaccaacaccagtaaatacggaaataccaccatgttcttgagcaatgttgtgaattaattcctgaatgatagtagtcttaccaacaccggcaccaccgaacaaaccaactttaccaccacgtacatatggctcaagcaagtcgataaccttgataccagtttcaagaatttcacgactagtagtcaagtctgcgtacttaggtgcttccttgtggataccttcacgagggtgatcttttgaaaattctggaccaccgtcaattggttgacccaaaacgttaaacacgcgtcctaaagtatcttcaccaactggaacggaaattggaccgccagtatcttcgactttcataccacgacgaagaccatcggtagattccatggcgatcgttcttaagacaccatcaccaagctcaagtgtaacttcaaggacaatgctttcatcctctgacttaattacacgcaaggcattgttaatatcaggtaaattcttatcaattgggaatttaacatcgacaactgggccgattacttgaacgatttcaccttcactcaaaacatctacctccttttctttattactctaaggcatttgcaccactgataatttcagtaatttcagtagtaatttgtgcctgtctagcacgatttaattttgtagttaagtttgataccagatcattagcattatcagtcgcactctgcatggctgtcattgaactagcatgttcggcagtcttagcatccaaaatagcaccgtaaatagtagaacgtgcatattgtggtaacaacttcattaacacttgatttggatctggttcaatatcgtattctaattctttatgtgcttcagcttctttgacaccaatatctaaatcgacgattggtaacattttttcaacacgaaaagcagatgataatgagttaacgtggtgagtataacatacgtaaagctggtcatagacaccattcaaaaacatcttaattgcggttgaaacaattggtaatgcttcatcaaaagttggtacatctgaaacaccattcttttcataaacaacgttaatattgttctttttaaagaattgtgccgcaaccgaacctacagcaagaactttgatatcgtgtccttgagcacgttcgtcctcaaagatactcatcatattcttaatgacattgctgttataagaacctacaagaccacggtcacctgaaattaccaagaaacctgttgtcttgatattcttacgtggctgaatcatatctgctgtaatccccaaaccaaagacatcagtataatcaatttgagcaacattgttcttatcaattgagacgtctttttcacgtagattatcaactacttctgagctaattaaacgagaaatagttctacgaatatggtcgttataaacggtataacctttatcacgattttcagtttggttcaactttgaagcagagaccattctcatagcttctgtaatcttaccagtttgttttactgaagcaatttttttctttaactcaagtaaagatgcaggcatattctacctcctatttctcacttggtgtaaagctctcactgaattcttcaattgctgctgacaatttcttatcatctggcaattgaccagtttcacgaattgtcttgagcaaatcagcatgactgctgtcaaagttatcaaataattcgttttggaaacgagcaatatcttcaactggaacagcgtcaagatatccgtgagtcaaagcataaagaatcacaacttgcttttcaacaggaattggatcatgaagtggttgtttcaatacttcaacggttctttgacctctattcaacttagcttgagtagcttgatcaagatcactaccaaattgagcgaaactttcaagttcacggtaagctgcaaggtcagtacgcaaagtaccagcaaccttcttcattgccttgatctgggcgttaccaccaacacgagaaactgagttaccagcatcaatggctggacgagtaccagcaaagaacaaatcgctttgcaagaaaatctgtccatcagtaattgaaattacgttggttggaatatatgcagaaatatccccagcttcagtttgaataattggcaaagctgttaatgaaccgccgccaagtttgtcattcaacttagcactacgttcaagcaaacgtgagtgtaagtagaagacatcacctggataagcttcacgaccaggcggacgacggagaagcaaggaaagttcacggtaagcgacggcttgtttggataggtcgtcaaatacgattaatacatccctgccattgtacataaattcctcacccatagcagtaccagcatatggtgcaatataaagcattggtgctggctcacttgggcccgcttcaacaacaatggtataatccattgcgccaaaacgctttaaagtttctacttgagttctaacggttgattccttttgaccaacagcaacgtaaatacaaattacgtcttgccccttttggttaaggatagtgtcgatggccaaactagttttaccagtcttacggtcaccgataatcaattcacgctgaccacgaccgattggaactaaggcatcgatagccttaataccagtttgaagtggttgatcaactgattgtcgatccataacccccggagccttggcttcaattggacgactcttgtcagtcttaatttcacccaaaccgtccactggttgacccaatgggttaactactctaccgattaaggcgtcaccaacaggaacttccatgattcgtccagttctttgaacacggtcaccttcacgaatattgtcaaattgacccaaaataatgatacctacatcatttgattcaaggttttgtgcaataccgtatgagccgttatcaaacttcaataactcaccagacaaaacatcgttaagtccgtgagcacgggcgataccatcaccaacataagttacaacaccaacttcgctgatgtcaagcttatcgtcgtaatgttcaagttgttgcttgatcaaggaactaatttcttccgctttaatgctcaatggtttcacctcttttaatttttatcaattatctgcgcacggatcttcttcagtttattcttaactgatccatcaatcacgcgatcttctacttgaagaaccacgccgcctaaaatacttggatcaactttattctctagacgcaccacgtttaggttatatttcttagcaaaactttcacctaaacgtttgagttgatcatcatctagcttaacagccgtagttgcaacgccagatgcgaccttcttttcattatcataaagtaagacaaagcgatcaataatatcgatcaaatcagcaaaacgatcatatttaagtaacaaattcaaaaagttttgaacctcatctaaaaaatctttttcaattgcagtcaaaagatcctttttatctttattacttaaaataggatcgctcaagacactaatgatttgtggattggcttcagcagccttttttaattccaccatttcattataaacagtgtctaatgcatcattgtcttgcgcataaccaaatagtgcggcaccgtagcgtgctgcaatttcttctctacttaaagccattaatcatccaaccccttaataaattggtcgactaaatctttttggtctttagcagataaattcttagcaattactttttcagcgattgctacagaaatatcagcaacttgatcgcgtgcagaattcaaagcgtctgcttttgcctgatcggcatcttcattagcctttttgcgaattgctgcagcatcttcgtttgcatttgctacgatttctttacttgtgttttgcgcgttactcttagcgtcagagagaatttgtgttgcttcttgtcttgagttcttcaaggcagcttcacgctcattagcaagcgtttcagctttctttcgttcactagcagctgaatccaagtcatcaataactttttgccgccgcttttccatcatatctgatactggtccccaagcaaagtgcttaataagaagcatcaagatggcaaaacagatcaaataccagatagcattacctaagtaaatatgtgaggctgcaaataatgtttgaatagtcatttactgcccttctctctttaatactattcctttaaacagaaaattatctctttttattaaaggaacaaaatcaagaaggcaacaacgatagccaaaataggaacggcttcgatcaaaccaacaccaataaacattgttgctctcaagttacctgcactttcaggttgacgagccataccttcaagagtctttgaaataactttaccgttacccaatgatgcagccaaagctgctaaaccagctgcaatggatgcagcaagatatttaaaagcttctgacataaatttatacctccaaaaatttattctgtagtaaccttcttaccaatgtaaaccattgataaagttacaaaaacatatgcctggatagagccaatgaagacagagaaaccttgccaaatcatggctaatggagctgccaaaactaacgtaaatggtccaccagcatgtgctagatcattaccaattaaagttagcaaaacttcaccagcataaatattcccatatagacgtaatgataaggttaaaaagttggtaaactcttcaattaaattaattggaagcataaaaccaactggttgcgtatagctcttcaaatatccgccaacaccaaatcgttgtacgccgaatgtgaacgatagaagcaaggtcatcattgcaaacgacattgtcgctactggatcagcagttggtgatttaataaacatccaatcatcaactttgacttccatgaacatccctaattggttcataaaccaaataaacaggaataaaacaaatgcatatagtgataggtgattttgagcatccttgtcgctaacattatctttaacaatgccgttagtgaaatcaagtaaatactcgaacacattttgtctcttattgggtttcatttcaacttttcttgaaagccaaatgcagataaataaaactgctaaagccattagcgttgaaccgataataccagaaagttcaaaattcaagcccatgaatttaaaaacaaatgatttctccattacttcgtgacctcccttctcgtgctgaataaaactcgaacacgtaaatcatcttaacaccaaaaaaggtctttgtgtaaaatgaaagcgcattagagaaaatatttttctaaaaaggacgattacttagtaccaaatagtctgtcaccagcatcacccaaacctgggaaaatataaccattatccatcaatttgtcatcttcagcagctgcataaatgtcaacgtcaggatttgcttcttgaactgccttaataccttctggagcagctaccaaaacagcaagcttaatttccttaacaccacgcttcttcaatgcagcaatggcatcattagctgagccaccagttgcaagcattggatcaacgactaaacattcacgttcagcaatatcctttggagccttgaagaaatattcatgtggcttcaaagtcttttcgtcacggtacatcccgataacggcaatcttagctgaaggaaccatttcaaggacaccattaagcatccccataccggcacgtaaaattggcacaattgtcaacttcttaccagcaatttccttttggacagtcttacccattggtgtttcaatttcaacatcttcaagtggcaaatctctagtgatttcataggtcattaacccaccaatttcaccaacaatgcgacggaattcatttgaccccgtatccttgcgacgaataatagtcaacttgtgttgaatcaatgggtgatccaaaactacgaactttcccatatatgcctcctataaaaaataatatgatcattaaatattttaatcaaaaacgcaaagggtttaaagccctttgcgttttattttttatttattgaaatgatgtccacctgcagctttattcaatcgattcatgtaagctaaactttcttcaccttcatgaaatccttgtacataaatagtttcgatatcatcttgatcatcgaaatagcgcaagccaccaaataagttatggtcggcatcaactaaattgttgcccagatcaaatttatttgcttgaggtaaattaattttagctaagactggcgctaaagctgctacaccaattttttcattaaaatcaatttttgcaaaatcagcaggatcatcaaccacgactaccggctcacttggagcataatgacggtatttcattcctggtgccttaggtatatctttgtctgacactttgcccgtgttaattaaaactttttcacctaaaacttcgcttaactcttctggagtaatttcaccaggacgaagaacgattggtgtttctaccgataagtcgataattgtcgattctaatcccacacgagtagggccatcatcaataattccggcaatcttcccttttaaatcatggtaaacgtgctctgcagtagtaggactaggcttagttgaggtattagccgatggtcctacaattggataacccaatttagcaattaaatcatgagtcaattgatcatcaggacaacgaaatgctacagtatcaagtcccccagtaactgcatctggcagagttcctggtttaacaaacaatagcaatgtcaaaggacctggccagaaatgtttaattaatttcttagctctttctggaacttctttagcatacttagccatcatttcttcgtcagaaacagtaacgatcaatgggttatcacttggacgtcccttagcagcataaacgcccttcacagacttttctttggttgcaattgcacctagaccatagactgtctcagttggaaaagcaaccaattcacccttagctaacaacttaactgcatcattgatttgatcttttttaaaaatcttcgtttccatcattcttatttttgccaccttccatgaaccatgcgtggcttgccggccatatcttttctaaattcgatttcaaaatcaggcaattctttagcaaacaattccttcagttgttcttcttcgctaaaaccaaattctaagaaaaattctccatggctattcaaatgctcacgcacttgcttagcaaattttttatagaagtctagaccatctttgccagcaaaaagagcttctttaggttcattttgcaagacattttcatccattacattcttttcgcttgtcttaatatacggcggattagagatgatcttatcaaattcttctaagcccaacagcacgttggctttacgagtagttacatcaagatcataagttaaaaagttttcctcacttgttcttaaggcagtatccgttacatcactagcatataaagttaaatctgtaatgccttttttctgtgcttctttagctaaagccacggtaatacagccagaaccggtacccaagtcaaggacttgatcacctgatttaagtgtctgcaatgcccattcaaccaattcttcagtttcaaaacgaggaatcaagacaccgcgttgcaccataattttatagcccaaaaaccaagcataacccaaaatatactgtggagatatgcccttagccaatttttcgatatctttattggcctgcttaatctggtcagcagttaagtccatttcttgcttcagttcaaattcacttggtgtcaagcctaagcgctctgctagaacataatcaacatcctcaggacgcgcattttcagcactctcacccgctttaatacgcatctgctttaaagtcattttaggcattttgatcagccaactcctctaattgcttagtttggttgtaaagaattaatgcatcaataatttcatcaagttcaccgttcatcacacgatcaagcttgttaatggttaagccgatgcggtgatctgttacacgattttgtggatagttatatgttctaattctttcggaacgatcaccagtaccaactgcattctttctcttagcatcgtactgagcttgattttgactttcataatagtcataaacacgtgatttcaaaatttgcattgccttttcacggttctgttgttgactacgttgatcctgcattgcaactacaatcccggttggcaagtgagtcattctaacggcactagaggtcttgttaatgtgctgaccaccggcaccacttgaacggtaaacatcaacacgaatatccttaggatcaatatcaatgtctacttgctcatattcaggcataacagcaacagtggcagttgaagtatgaacacgtccttgagattcagttactggaatccgttgaacacggtgtgcaccattttcatactttaatttcgaataaaccttgtcaccagtaatcatgattgccacacgtttatagccgccaacctcagtaggttctgaatcaatcattgaaaccttccagttttgacgttcagcatatttttcatacattctaagcaaatcgccagcaaacaaagaagcttcgtcaccaccggcagcaccacggatttccatgataatatctttatcatcgttaggatccttaggcaacatcaaaatcttgatttgatcttcaagctcgggaatttctttctcaatttcagaattttcttccttagccatttcaattaaatcaggatcagtttcactggagataatttctttattatcttcaatctcttttttgtcctctttgtacttcttatatttttgtactacttcacgcaaatcggcttcttccttagaaatctccatgtagcgcttagtatcattaataacttcaggatcggccatcatttcctgaagttcttcatagtgagctactagaccctctaattgagccataactttatccataaactaaaaatcctctctatctttcaacacctgggtgaaagtaatgatagcgacaaacaggataataactttcatcgccaccaatttgtacttgttcaccctcataaacaggcttgccattgttaattcttaaattcattgttgccttgtgtccacaataatgacaaatggtcttcatctcttctattttatcagcaaaaatcaataaattttcactaccttcaaatagatgattttgaaaatcgttttttaagccaaaggtcattactggaatattgaacacatccacaattttagcgcattctaagacatgatgtctcttcaaaaattgtgcctcatcaattaacacacaagctagtttaccatcaccatcagcaacatctgctttgttcatctttttaatataatcaaatagattcatatcagcagtaattggaattgcttctcggtgaagtccaattctagaagcaatcgttcctacaccgctacgattatccaagccactggtcattagggcaatcttgcgcccctgtgcttcataattgtgagctactttcaagatctcaattgttttgccactgctcattgcaccataacgaaaaaataattgcgccatgctggccctcccttttaacaaaaagtcttcgccttaatagtatagaggaaaaaataaatttgtgtaggtattaaacctcgttttcatcctcgctctatgctaaacttagacatagttttaaagtgagggatgtacatgagttttaaatcaggaattgctaaagttgccggtaaatcaagctattggtttttgcataatgcccttaagggcggcaccagttttccaggcaaattagcaatgaaaattgatccagaagttttaaattctttagccaaaggctatgaaactgttattgtcacgggaactaatggtaagacaatgactactgctttgattgttgaagctttaaagaaaaagtatggtgatgtgttaactaatccatctggttccaacatgcaacaaggaatcgtgaccgcttttttggctcacaagcacaagagagttaaaagaaaaatcgctgttctagaagttgatgaagcaaatgttaaaatggtgaccaaattacttcatcctagcgtctttgtattaaccaacattttccgtgatcagatggaccgttatggtgaaatctataccacttatgacaagatcgttaatggtattaaattagcacctgacgctacaattatcgctaacggagatgcaagcattttttcatcagttgaattgcctaataagaaaattttttatggctttaaacttcctgatgacaaacctgaaaacgacttcaaggctccagtcaataccgatggtgttctttgtccaaaatgcgaccacattttacattatcatgaacgtatttatgccaacttaggtgacttcttctgtcctaactgtggctaccaccgtcctgatttaacttttacagttaacaagattattgatcaaacacctaatagctcaacgttccaaatgggcaacaagcaatattccattaatattggtggtacttataacatttataatgccttagccgcctattctgttgcacgccacttgggattaactgaagctgaagttgctcaagcttttgcagaaaataaacggatctttggtcgtcaagaattaattcactatggcgataaggatatcgatttaattctagttaaaaacccagttggtttggatgaagtcttgcacatgcttaatacagaaaaagatgattattcactagttgccttgcttaatgccaaccacgctgatggaattgatacttcttggatttgggatgctgattttgaaggattagacaaagaaaagattaaaaagatcctcgtcggtggtcaacgctggcatgatatgggctttagacttgaaattgctggctttgatccaggacaaatgagtactaatccagatgatgatagcctaattgaagaaattaaaaaactgccaactaagaaggtctatattctttcaacttatactgcaatgcttgcacttagaaagaagatggccgaaaagaaaatcattaaggctggtatgtaaatagaaaggattcccgcgggaatccttttttgtgtacaaaaaaggctgtagctctaatgcaatgtcattaagttaagacattgacaattaagggtgcttttttagagatcgaatcatttggattcgatctctttttttgtataaaataaaggcgaaaagaccagccttttcgcctatcttatatattatatattttaaaccttcaaaattattgccagaaagatggtgttaattatgaaagcccttcataagaatattctagaacgtcttgatcaaattatcaataatactggggatcatattcacgattttattaataatcctcatgcttttaccaggaaacgcactttagatgcagcgacagtccttaaaactacaattaacatgcaaggtcagaatttaaacagtgaactctttagagcttttggcgaagatgcaactaaaaagaacgataaagtagttagtacttctgcctatgttcaacgcaaaagccagctttctcctgcttgttttaaacatattctgactgtttttaatcaaaatctatttaatattcaactttttgatcatcactaccgtttgtttgccattgatggctctgactttaatcaaatctggaatccgaaatcgaataacattgtacaagcttcttctcataaaaagaaaccctattgtcaaattcacgttaatgccttatatgatctattgaataatacctaccaggattgtatttttcagcctaaatcagaaatggatgaacgcaaagcggctgttcaaatgcttaaagctttgaattgtggtccatatattgtaacaatggatcgtggctacactagtttcaatatgattgaaaactgcaatcgcctgcctaactgtcattacataatacgaactaaggctggacaaggcggagttaaagaaataacgacattgcctgatcaagaatgtgatcgtgagatttcctgcctggtaactacttctaactattactacatcacgcataaagccagtgagaatattcaccatgtccagcatcattatcgccaatatattaagtatcgctctaaaaatacccaggatctaagctgggattttggcgagttatgcacaataaaatttcgagcctgcaaatttagaattaatgatgccaaatcaggcaaagaagaatgggaagttgtgctaaccaatcttgatcgaaaaaattatccgctaaaaagaattaaagagctttatcatctgcgttggggtattgagacctccttcaagaaattgaagtattctttaggcagtgtacagttccattccaaacaagataaatttattgaaatggaaatttatgcccatatgattatgtttaatgcaatcagtcaaattgatgcacaggcctatattccgcaaaagcattgcaagtatcaatatgccatcaatttcaagcaatcatgcttgattattcagagcatgtatttggcttcttctttaacgcaagattttgaacggatccttattcagatcagctattataccattccaattagaccaggccgcaaggacaagagaaatattaagcccaaatcagctgtatattatttatatcgcgtagcttaaaaaagcagaatctgtgctatgccttatttgttgtacgaaaaaagcaccaatttaaccaattaaatgttaaatcagtgctttaaaagtctaatattaattgtcaatgtcttaacttaatgacattggctctaatgctacagcctttctaattattgggatattggggctcgaacccaaacatccaggaaccagaatcctgtgccttaccaatttggctatatcccagtaaatcacccgtacgagaattgaactcataactccaccttgagagggtagcgtcttaaccatttgaccaacgggcgaatcaacatttataattatgcttttttcttctatgcttgtcaagtaattttaactataataatgctaatggatggtgaaacatgatcgactttaataaaacacagcatttaattgaatcaatggtttttgaacgcgttgttccaggcgtcaattacacttttatcaaaaataagcaaatttttacatcaactactggttttgctagtatctacccagaagttactcagctgagcccttttgcagaatacgacctagctagtttgactaaggttttagcaacagaaaatgtcttgcttaagctttatgaccaaggcaaacttaactttaccgagcccttgcagcaattcgttcctgaatttaaagacccgcgtgtacgcctttatcacttgctaacccatactagtggcattcgtggctggatcccccaccgcgacaaactagatcatgatgccttactacaagcaattatcaatctgccagtaactgacgaatttgaacacaagatgcggtatgccgatacaaactttatcttacttggattagttattaaaaagatttttggtaaacctgtccaagaagtagtcacagagcaagtcctcaatcaaatgccgcttgaaaatactactttttcaccacaaaaagatgattgcgtgcctactgccctagttgatggccatgtcttgcaaggtattccacatgatcctaaagctagacaacttggaatagattgcggttctgctggcttattttccaatcttcaagacttagttaccttcgcccaaggttatttaggactaaaggatattttaccttatagtcaaaagactgtcagccagctatttgataataaaaatccccaaggcataaaaccacgctcttggggatgggaccttcggtttgatccaaagcaaaattatccgatcattttgcacacgggttttactggtactttaattattcttgatcgcatcaaacgctctggtctaattttattgaccaatcgagttcatccgactggacacaacactgttttcttagctatgcgcgaaaaaattatccgtagttttatcaacgaaaacgccaaaatataatttatagaaaaaagacggctgtgtgtcagtcgtctttttatctctcactaaatttcatcatccgtctagtattataacttattttaacgctaatgtactagtcaaatattatttttctgctttaaacattttccagtagctaattaaaatgattaatgccattaataaagtaaaataaaaggccgcctgactaccttgagctgtcgctagtgcgtaggacgttgcaccttttttctgccagatcgacataattgctgctaagatagttgttcctacagaaccggctaattgctggctagtctgacaaactgcggttgcatcggcgcgcaatgctcctttttccacctttaaagcttcagctagcgtgttagaaaatgacattctgtgtcctaacatcatgatgccataaataataatgatcatcatcacagtcaaatttaagccccaaatagcaaataacaagcagctgatcgccattaagaagccacctaaataaagtggcaatttagctccttttttatcatataggctaccaaaatatggattgagtagccctgcaataatactacctgatagtaaaatcaaaccaccaactaaagatgtttgctttccgacaatttggatgtagttaggcaatacaaaactgataccaatattattaaattgcaataaaaagtaagctaacgcaccataaacaaacgctttttgcttaaatacggctagatctaacaatttcttggatgattttttagataatctaacaaataaccaaattaaaattgcagtcacaattaataaaatccacattaaaggattagcaaatccattactaatttgatttacgcctaatgtcaaagtaataaatgctatagctaaaacgataaatgatagccaatcaaaactatttttagtttgttcatgatacttaccgactacaaatagcccggcaacaaaaacaatgatcgcaaaaattgtaacaaaaccaaaaatccagcgccagttaagataaaaagtagtgataccgccaaatgctggtcccaaagtcggtgccatagctactactaagccggcgattcccatgtaaacgccccatttttcgcgaggcataacttcggttactaagttaaacatcaacggtgtacttaatcctgcacctagagctgaaatcagccgacctaacaataaaataggaaaattaggtgctacagcactaattacgcttccaatcataaaaccaacgcaagcaacaataaacaattgccgcgcagtaaaacgttcattcaaatatgaagaacaaatcataataatcgcaatcgccaataaatatcctgttgtcgtccattgaattatatccaaaccgacaccaaattgcttcatcatcgtaggaaaagtgacgtttaaactagtttccgtcaaaattccgacaaatgacataaacgcagctgataatactgctaaaacatttttagtattctctttcacacaaaaatcctttccacaaaaaaagaaagagcaaaaaacctttgtttcctattctttctttaattagcacagctaattatattaatacgcatactatcaaatatgctgagtatatctaatattaaagacgcttagctaaatcgtcgtgtaagttttcgtaacctggcttgttaagtaaaccaaacatgttacgcttgtaagcttcaacacctggttggttgaatgggttaataccgttcaagtaacctgaaatagcaattgctaattcgaagaagtaaatcatgtaacctaaagtatgtgcactttggtctggaatgttaacagtcataactggaacaccaccatcggtgtgagccaaaacaacaccttcataagcacgatcgtttacgtagttcaagctcttaccttccaagaagttaagttggtcaaggttcttttcatcgcctgggatcttaacatcatgacgtggattttcaacacggataacagtttcaaataaattacgtaaaccttcttggatgtattgaccaagtgagtgaaggtcagtagtgaagttagcgcttgatgggtaaatacctttttgatccttaccttctgattcacccattaattgcttgcaccattcaccgaacattcttaaacttggttcatagttttcaacaatttcagtagtgtaacccttacggtaaaggatgttacgaagtgctgcgtattggtatggagttgcctttgacaaatcagtatcagtgtagtcagcacgtgcgtctgcagcacccttcatcaattcgtcaatgtcagcacctgaagcagcgattggaagtaaaccaacagctgaaagaacactgtaacgaccaccaacatcatcaggaactacaaattcttcgtaaccttctgcatcagcttcagtctttaaagcacccttttgacggtcagtagttgcgtaaattctcttagcagcttcttccttaccatacttcttgattaacttgtccttgaagattctgaaggctactgatggttcagtagtagtacctgacttagaaattacgttaacactgaagtccttgtcgcctaaccattcaatcaagtcataaaggtatgagcctgaaagtgagttaccacagaagacaacagttggcataccgttcttttccttgccatagaaattgctgttcaagaattcaattgcagcttgggcaccaaggtaagaaccaccgataccaatacaaatcaaaacttctgaatctgattgaatcttcttggctgccttcttaatgcgggcaaattcatccttgtcatagtcaactggcaaattaagccaaccacggaaatcgttacctgcaccagttccatcgcgaagttcagtgttagcagcgttaaccatagcttgcatttcgcttaattcattttcatgaacaaattgtgttagtttactactatcaaatttaattaaactcataaatctgcttcctaactaaataaaatatttttcacaaacctattttaacaatcttgatttataaataccagtacattataagcgcattcaggcttttttgacaattttaaaaatcacataaccccaaattgctccacaagtattgaagaaaacatcatcaatatcgctaacccccgtcaccagcaaaaactgcagagtctcaattcccactgaaaacagcatccccatcagtaccgtccttaaaaacgttgctctttttgaaaaaacaatggggaaaaaaatgccaaacggcacaaagcacaagacattgccaaaagaattataaaagaaatccaaatgactgggagcatagactaatttccaagtttccttcatgaataccaagttaatatcactcaatggcctagagaaattaaaatcaagctgccacggaaagtaggtatttctaaaagttgtcagcatcaaaactaagattatgtaaaaagaaaagacccaaacgctagcttcagacctaattgatcttctgcggcgcaccaaaagaagccaaattaagcgcaatacagcaaaaattaaaaaataaaatattgttttatccagcgctaataaggttaatttaactaatgcaaagtggttaatattagttgcatactgtttagctaaaaaactataaagtgggcccaaaaatagcatactttgcctctttccaaaatattcattatagattatacctattttcacggctggaaaatcttaaaaaaaagataactcttagcaaattattgttttaaaagaggtgaaccattaaaattaaaagatgttaaaggagcattatatggaaaaaaagaaaattatcagttttattcaaacacgaacgggctttttaacccttttagttgtttgtttctggctgaaatatatttttgcagcttattttgatttcaatttaggcttgagcgacccgtatcaacatttcattatgtggctcagccccgtagggtccgccatcattttaatcagcttcggtttttatattcctaaaccgctgatctcttacatcacaatgttaattttagactttgccaatacggcattgctttttgcaaatattatctactatcgtcaattttcggactttttaacaattaaaacgatgtctaacgttggtaaagtttcgcagggtctaggtaaaagtaccgttgcccttctgcatccaacagatattattatctggattgatttgatcgttattgttactttactgatcattcataaaatcaaaattgatcaaagatcttacggcttatccaccccatttgcgattacctcagtaggcgcatttgtcctaactcttaacatttttttggcagaaacctctcgtccgcgcttattgcgcaacacttttgatcgctcctatgtcgttaaataccttggtattgacacctttactgcttatgattgcttcaagagtgcgcaaaatgttcaagtcactaaaaatgccaacgctgcggacttgaaccagattttaacttttaccaaaaaacaaaatgctgctccatcttcctcatattttggtattgagaaaaaacgcaatgtgattatcatccacttagaaagtttccagcaatttttaattaatcttaaggttaatggcaaagaagtgacgccgttcctaaattcactttatcaaaataaacatacgctcagttttaacaacttctaccaccaagttggtctaggtagaaccagtgacgcggaaaacatgctagaaactagtacttacggtattcccgacggatctttattcacttctttaggttcggaaaacacctttcaagctgcaccgcaaattttgcgtcaagatggctatacttccgctgtctttcacggcaacgtcggtagtttttggaatcgaaatgatgtttataaaaatatgggctataattatttctttgataaaaattactatagctcccaaagtaaagaggcaagcggctatgggttaaaagataagctgctttttgccgaaagcgttaaatatttagagcagatgcagcagcctttctatgctaagttcattacggtaaccaaccacattccgtttaacttagataaagaagacaaggaccctaactttaagactacaaacactgccgaccaaactatcaacaattactttgaaactgcccactacctagatgaggcattgcgtgaatttttccactacttaaagtcttctggtctttacaaaaactcaatggtagtcatttatggtgatcactatgggttaagtaattctgaaaatgaaaccttagcaccaattattggtgaaagctctgacacgtggaatacttacaataatgttcaaatgcagcgtgttccattcatgattcatgccaataatttgaaaggaaaaattaatcatgaaattgctggtgaaattgatgtcttgccaacactgatgcatttgctcggtattaacaataaaaactatgtccaattcggtagcgacatgctttcgcctaaaagacaaaattggatcgtctttcgtaatgggaccattgtcagctccagatatatcatagttggtgctaaaggaatcaaaggtaccgtttatgaccgagttagcggtaaacaaatcattaattttactcctcaagagaaaaaagaaatctctgagctagcacaaaaggccaaggcatcattagactattctgacttattaaacaaccacaatttgttacgcttctacaccccaactggctttgtccctgctgatccaacccaatttgattattccgtcaattatcaaaaaatgatcgctatcagaaatgaattagctggcaattccacctcgctttatagcagacatcgcggtacaactactaatctttaccgtactgatgccgctgaactaaaagatagaaaacaagaaattacccaagttcctgacagcgttaaaaatattaaagagaatacgaaaaacaaaaatagttcagaaaataccaataactaaaaagaacgcacagacctttcaaaaaaactgtgcgttcttttttagtttttagctacaaactgttcatagcccttgtcataaaaggtcacggtgaatgtggaacctttacctggtgcggaaaatacttctactttgccaccatgttgcttaatcaaagaagaaacaatcgcaagtcccaagcctgattcgccagttcccattcgagcacgcgatggatcagccttgaaaaagcgttcaaaaatatacttagtctgattcttgctcatgccaataccattatccttaaccgataattgtgttccatgctctatccgtttacccgaaataataattttgccatcatgagtgaattgaatcgcattttgaactaagttaaccattacctgggtaaaacggtcacgatctgcataaataggcaactgatcaggtgcctctacaaccagctcatcgttggctttagttgcattttgttttaattgcgacttcaaatcatgcagaataattgtggcattaaagttagtcttaaccagcataatttgattatttcgaatcttttcatagtccaaattttcattgactaaccgaattaatcgtttagtttcgcgctgcattaacgcgattgacttcggtttagaatcctctgggatagcatcgtattgcaagccctctagaatgccattaattgttgtcaatggcgtccgcatttcatgagcagcatcagccatgaattggtctcgtcgctcttcttgagccttaacctcttcgttcgactgcttcaaagcctgcaccattttattgaaattctcagccaattgatcaatttcatcgctatctttatgctcaatttgcacattaaagttacctgatgcaactttttgcgtagcacgtgataatcgcttaattcgtttagttgaataataagaaataataaagctcagcaacaatccaaccgctacagtaattaacaatgcacgcaacaaattgcgtttagccattaaaatcggtcgctcaacatgctttactctcgatcctatccaaacaatgccaacaagatttttgccattcatccatggaaccaaaacccccgtgtaggcatccttagttgaactaatcggtgaattttcattatgattattttgaattctaatctcttgcccattttttaaagtagtaaaaacttcttgtgaaagctgaattctagcctttgttttgggataaatctgctcatttttatcattaaaaatacgtaaatgagcatcatcaccacgaagaacatattctaattgattcaagaagttattgctaagcaatgcagtcccattttggctatcagcttccgccaagtttcccaaagaattagcatagctttccatccgctggtagttttgcgtataagcttgattacgcgcataaccaatctctgagtaaccaataatcgagatagttgtcacaataatgagtaagaaactcaacatattttggtaaattaatttcattatttgacctgcgaatcatcaaacttgtaaccgacgccccaaacagtttggatcaccttggcaccaaccttctctaatttctgtcgaagctttttaatatgagcatcaacagttctttcttcaccataatactcatagccccaaactagttctagtaattggtcacgagaaaagacttgtttaggcttttgtgccattgtatacagcaaatcaaattcttttggtgtcaaacccattaccggctgattatcaaataaaacttctcgtctattttttgaaatcttcaaatgatcggtcgtaatctcatagtcttgattatcttcttgagtatgagctggttcttcttccatcatcacgcggcgatgcaaagccttaatgcgggcaatcaaagcaattgggctaaatggcttagtgacatactcatcagctccgatacctagccccaacacttgatctgattcactgccacgagcagtaagcataataattggcactgtcggcgaaattgcccgtacctctttagctacttgaatcccatctttttttggcaaattcaaatctaacgtaatcagatcatacttatccgcgttctttttaaacatatcgacggcttcgacaccatcaacagcaatgtcttgttgccaaccttcttttttgaaaaacattcccatcatttcagctacggaagtgtcatcttcgaccattaatattctcaaactcattatcaatccctaaatccttttgttctcttatgcttcacttgatcaggatcgacatagtcatgtggcaattcatgtcgtttagacaaaaatgttttcaaacttttttcggtataaacaattggcaataagataaataaataaaatgttaacagccaaatgagaaaatagcgatcccaattcaaatagtgaatgattactcctaacagtgcttgaataaacccaaacaggatacaataccagcttgcccgtttctgagcaaacttaaaactatcctggttaacttgcgcaagataagataaatagccataaattcggttgggccttttggctggcgtaatcagccaaatcaaccctaccgccaccataactaagccacaagcgacatagatcacgatttctcactcctaattctgataaatttaaacggttattcctcacctggtgcagacataactattctcattttaccagtgaaagtgaaattcttcatctcatttggaataattaaattagttcccatcttcaaatcatatgacttgccatcagcttctaattttccttcgcctttgataacggaaactaacaggtatggatgatcctttaagccggtcttccaagtaccatcaaggtcaatttgccacaaataaaagtgtggtgaaagtggtggttcaaccaatgtcttaatttctgcatcttgatcttggctagtcttaacatctaacttaggatcaacatggggaacagtggtcacatcaattgacttttgagtatgaagctcacgctttttaccatccttgcccacacgatcgtagtcatacaagcggtaagttacatcacttgactgttgagtttcaattactaagcatcccttagttaaagcatgaattgtacctgctggcacatagaagaaatcgcctgctttaaccggaacttttctgagcagcttatcccattcgcctttgtggatcatatcagctaattcttcacggctttttgcatgatgaccataaataatataagcacctggatcagcttgcattacataccaagactcagtcttaccagaatcattttctactttgcgagcataatcatcatccgggtgtacttgaactgataaattatcattagcatctaggaattttaccaataatggaaattccttggccttaggattgccaaacaattccggatgcttcaagtaaacatcccgcaatgacattcccttaagtggcccatctgttacagttgacgcgtcatccttgtaacctgaaataatccaagcttctccaacttttccttctggaatatcatagtgaaaaatatcatctaatttacgtccaccccaaatttttggcctaaagtatggggttaaaaataatggttccatttaaatcacctcaattaaagtataaactttaaggcagaataaatgaaacccttttcttagatatatgtatactatttgttttacatgtaaagctacttgttatacttacgaatacctgtagctaatctttgcatcccatccttgaccatcgtcaaaggacaagctagattaattcgaataaaatcatggccatttccacgataaacactaccagctgaaataatcagcccagtttcttggcgaatgaactctgctaattcctgtgaatcagtactgatcttttgcacatcgatccacatcaaatatgtcgcattgcccgaaatgatttgtacttcaggaatgtttttttcaataaaattctgcacatacgcaaaattttgctttaactgttttttcaaagcattaagccaatcatggccttgctcataagccgcaatcgttgctggaatcgccaataaattaggctcggctacttcatcactatttaaaccgcggttaaccatattgcgcaaattttcattaggaacaattgccgtagcagaatgaagagcagcaacattaaaagttttgcttggggacactagtgaaatcacactattttgtgcttcacctgttacagaaaaggctggcgtgtaatctggaccttgtctaaccaaatcaccatggatctcatccgatagtaatgttacatggtattggtgacaaagatccgcaattttttgtacttcttcactagtccaaacttttcctactggattatgtgggttacaaaaaatcatcaaagtcgttagcggctcagctaatttttgttccaagtctgcccagttgatcgaataacttttaccatcgaaagctaaatcactcgacaaaacatggcgcccattattcaaaatggaattataaaaaatattataaactggctcttgtactaaaacattatcaccaatatgtgaaatacggcgtacaattgatgaaatagcagggactactccagtagtaaaaatcatccaatttgtttgtggccgatgattatgttctgtttcataccaatcagcgacagcattaaaataatctgcttgtgggaactcataaccaaatgcacctaatgtcaatttttgttgcattgcctcgataatttcaggtgccgtcttaaagtccatatcggcaatccacattggtaattcatcagacttcacatcccactttactgaatcagtctttgacctatctggtgcattttcaaaatcatattgcatatatctcactaatcctttggtgtttggttcgtatcagaatgaacaatttttgtacctattttcggacaatcaagctcggttttagatggatctaccttatctggatcgataatcaaagtaccaatctcaggtaccgtaattttaccagaaattgggtttttaatactatcaatctttgtattaagctccacatctaaattagaaacatattcaaaagctaaatctgtatgaatcaaggaaccattcttaatctcaagctgatcaatgtagttcaagccctgatcactttcaattttacaattaattaacgtaatgttgttagtattccaagctaaatattcaccatcaataattgaatcgtaaatagtgacattattgcaattccaaaaagcatctttagagataaaagttgaattatgaacttcaatgttttctgcaccatcaaaaacataatttcccacaacggaaacgtgatcaagataaatattctggctatctttaccaaaataatcaccattaatttgagaattggtaatcttaatatcattacaagtccacattgtttcttctgcgttagcaaaatgaacattatctaaaataatatgacttgtccttctgaataatttaggtgcctgtaaagcactatttttaattgaaatattcttggtataccaaattccagaccgtgacatagtttcaaacgtggtattttcaactttcacattttcatcataccaaagtggatatttccatttaaaaattgaattctttaatctgatatttttagcttcttttaagggagattcaccactgccaaatgtaataccatcaaggattgcatcagttaatccataaagaattctttcacctgcaaaatatttatttttgtattccataattgtttccacctttttgttaatttaataatcattaattttaggacagtattcattatatgatttctttcatgcaatgtttaatacttatttttagtgataatgcataacaaaaatgcatagcagataaacgatttagcaaaacaaaaaaccgctctagaacaacatctagaacggttatctatggagatgaggggagctatctctacttttagttaattccaattacttctaagtactgaaattaagccattttgatgttggttgattttaattaattttgaagttggatacctttctggatacctgataattttgacaataaaattaaaagcctatatactaaattttgtcaggttagtatataggcttcgtttttgtgtcactagattttgtcgctagtgacttttttattcttcaaattcataagaatctgaaatagcatttataacatcttttataaaagatgcaggtgcatgatccactttgtaccaatgccgtgcagctaagtctaaagttgtttcctgttgtgcttctgcaactccatggacttttaaaccttcaggaactggaatatgtaacggaaaatcattttctgttttactaatcggtactactttcacaagtgatctagttaacctagtaaagtcatgattagatacaattaaagcaggtctagttccttgttgctcatgtcctaaacttggatcaaaaccaataatgataatgtcaccttgatgaacatcaatcattttttcaccccccctttctatattttaggtgactttcttaccatttaatttctttacctacaggcttgccccaatcaacttctttggattcaccaggatgttcattatcccatttatcccaatatgcctcataatcaaagccctcaaatcgttgtgctagcttgctctctttttttcttttcaaaattagttctttattcttaacttttacctcaaaagtagctttttcagtagtaattccaagatctctgagtagtgacttagaaagtctaataccttgggaattaccccatttttgcaatgtaatctccataagaaaacctccaaaaattacttatcctttactaagtatatactagtggatatacttagtaaaggataaagtagtaaaaatcagttttattgttagaatctttatctcagcataactacaataaaaagccatcctatgagtcttgatttctaggatggctttttacaataatacatatcattaaatatacgctacatatatttaaatgatcaatatagtctgcttaatcttcttatttcatttccaactttccttccaaaatcacatcattcaagaaactagaagatgaactatatccatgttcttttgcaatctctgtcaatttagttcttgcacttggtctcaagctaaaggtgtaaggtcttctcttttctctcttaatgtaattacttgattctttagaaggtgcttccttactagacgcttcactaactctagaagtttctttcaatacttctgcaaactttcttccttgatttgggttaaaactcatttaaaaatcctcctaattattcctacactgtacctaacttcttggtacctaaaacaacatatcctggtacttgtttaaaagtggtcttgtatgtgatcaagcaatgaatctctcgtcctgtgtaatttgcggttgttggattatactcttccagcaatagcaaatctcctacctgataattacgatcattttttctaatttcaaaatttttagagttatttacttgtgcctcaaaataacttggaagaatttttactcgatgttctttgatctcgagactgtaaaatagtttgtgtaaggatgaataattccttaaatttatttctttaaacattagaaaaaggagttcctttctcgtatgattggtttgaacaaaaaaacacatacagaaagaagaactccttcatgaatgattttaccaaagattttgctcaagctctattcaatccagacaaaataaatgatttattgcgcaaagagctacaacaggctgttaataacttgctagaagctgagttaactgcctttctaggctatgatccctatgccagaaatggctggaatactggcaattctagaaatggtgcttatttccgcaaggttgatacccagtttggaccaattgaagtgcaagtgcctcgagaccgcaacggtcagtttcatcagcacacgctgcctgactacaagcagcactctgatgttttggaaagcacgattatcaagctctactccaaaggcgtaactaccagagaaatcgctgacttgattgagaaaatgtatggcagtcattatagtccagctcaagtatcaaatatttccaagcagatgctccccaaggttgaggcttatcacaagcgcaagctaagcgacaagtttttctgtgtctatttggatgcgacataccttcctttgcgccgagaaacgtttgagcgtgaagcagtatatattgccattggcattaaacctaatggacataaggaagtcattgactactgcattgctcctagtgagaacattgaagtctggacagagatgcttcaaaacatgaagtccagaggcttgaagcaagttgaactctttctttctgatggtgttgttggcatgaaaacagccttggccaggacttatcctaaagctcattttcaacgctgcctggttcatgtcatgcgcaatatctgtgctaaagtccgggtggatgaccgcgaaaagatcatgaacgaattcaagcagatacatcaacagacaagcaaaaaagaagctgcagctgtcttgcacaaattctatgccagatggaataaagcttatagcaatgtcatcaaaggtttgaaggaaattgagcccgatctgctggtcttctacaattatcccaaacaaatcagagcttcaatttattcaaccaatatgattgaatcctttaacaacgtcatcaagcgtaaagctaagcctaaggcagaatttccaactgaacagtcgcttgatgcatttattggcatccaggcaatgagctacaatgaccgctatttcaaccgaattcataaaggctttggtcaggttcaggataccttagaatcctattttgattaaataaatgattaaaaaatcaatttacgagaaagaactatttacacaaaagatttgacagtttcttgatctcatatacgccacttgatgtatatactttcattagcattacctcatattttatttatacattacgtatacttagtttatatttaatgtatatttgctttatacattatttgtaatggagccaaagataccatttaactcattgaaaaatgatccatacctagattgcatttttttatctttcatcattgtactgattgccactttatctaaagtggagcggttaaacagctctcgattgggaatcttaacaatgacacttggatctttttgtaaaacttctaccaattcacgagaagatctagtgttgtttttaatcatgtttccaacaaatagcaattttgcatctactaacgactgtctcgtacgataatcgattgtttctcgtttaagctccttaaagcgctgctctaagttgaatttggcactataaccgtgttcgctcggagtaatagggctaagaatatcatcactaataatcactgcgttctttgtcgcaattgaaaaatcagggtggcaatcaataataatgtaatcgtattgatctagttttctagtgtcataattatctgctagccacatgtatagcagcatatttttatcgactttagtttcaatgtctgcttcaatatcgtctaaatgcatatctcctgcaattagatcaatattttcattaatctgatggattttaacttgatcattctttaagaaaatatttcctactgtatactcattatcataaattcgatatgtttgggtcaaattagattgatggtctaagtcgataaacaaaatccgtgatccgtggttagccaaccattcgccatagttataggctaatgtggttttacctactccacctttaatagctgcaaaagtaataatcttcattttcttctcctttaattatactgtactcatacgttatgtataatttacttatgcttaatttaaactggtaacgcagcaaagaaacctgttgaaactaggtatgccgaaacagcaattactactacctgtgttactaacatccaacccacaaagcttttatcaaacttgttagccttatgcttagaaatagtattcataattgttccctccatattcatatgctatgtataagttatttatgtttaacttatattatatatcatatttataatatttcaacaactatcgtttttatttttataagaattcaagtgtaaaattaaaaaagataaaattgctgttttccaatgtcattaagttaagacattgacaattaatattagacttttaaagcactgatttaacatttaattggttaaattggtgcttttttcgtacaacaaataaggcatagcacagattctgcttttttaagctacgcgatataaataatatacagctgatttgggcttaatatttctcttgtccttgcggcctggtctaattggaatggtataatagctgatctgaataaggatccgttcaaaatcttgcgttaaagaagaagccaaatacatgctctgaataatcaagcatgattgcttgaaattgatggcatattgatacttgcaatgcttttgcggaatataggcctgtgcatcaatttgactgattgcattaaacataatcatatgggcataaatttccatttcaataaatttatcttgtttggaatggaactgtacactgcctaaagaatacttcaatttcttgaaggaggtctcaataccccaacgcagatgataaagctctttaattctttttagcggataattttttcgatcaagattggttagcacaacttcccattcttctttgcctgatttggcatcattaattctaaatttgcaggctcgaaattttattgtgcataactcgccaaaatcccagcttagatcctgggtatttttagagcgatacttaatatattggcgataatgatgctggacatggtgaatattctcactggctttatgcgtgatgtagtaatagttagaagtagttaccaggcaggaaatctcacgatcacattcttgatcaggcaatgtcgttatttctttaactccgccttgtccagccttagttcgtattatgtaatgacagttaggcaggcgattgcagttttcaatcatattgaaactagtgtagccacgatccattgttacaatatatggaccacaattcaaagctttaagcatttgaacagccgctttgcgttcatccatttctgatttaggctgaaaaatacaatcctggtaggtattattcaatagatcatataaggcattaacgtgaatttgacaatagggtttctttttatgagaagaagcttgtacaatgttattcgatttcggattccagatttgattaaagtcagagccatcaatggcaaacaaacggtagtgatgatcaaaaagttgaatattaaatagattttgattaaaaacagtcagaatatgtttaaaacaagcaggagaaagctggcttttgcgttgaacataggcagaagtactaactactttatcgttctttttagttgcatcttcgccaaaagctctaaagagttcactgtttaaattctgaccttgcatgttaattgtagttttaaggactgtcgctgcatctaaagtgcgtttcctggtaaaagcatgaggattattaataaaatcgtgaatatgatccccagtattattgataatttgatcaagacgttctagaatattcttatgaagggctttcataattaacaccatctttctggcaataattttgaaggtttaaaatatataatatataagataggcgaaaaggctggtcttttcgcctttattttatacaaaaaaagagatcgaatccaaatgattcgatctctaaaaaagcacccttaattgtcaatgtcttaacttaatgacattgagattttttctaacaccttctattttttaagctttatttgtaccataatgacatcatttgtatgttataatgatgtcatagcgtaaaggagtgattgttatgacatcatcaactacaatccgtcttgatgacgatttaaagagaaaaatgcaaaagaatttagatgctgcaggcctttcaatgaatgcatactttgtaatggcagctaaacaactggttttacaaaaaaaagttccttttgaaatcttgactgaaccagaaattcctaataaaacaaccgaaaaagcaatgcttctagctgatgccaaagatgagggcttggttacagatgattcgcctagttttactaatgtcgatgatttaatgaaatctttggatgagaactaatgtacactatcaaatacgagccacaatttaaaaaagactacaaaaagttcaaaaaagaacatccagagttaataaaagattttaagaatacagttattcagttaacccaaaaaggaaaagtcggaaaggactatgaccttcatccgttagataaacgtggtggtaattacagtggtcattttgattatcatttaagtgaaggaacggtcgatgttgtagtgatctacaagccacacaagaccaattcaataattagatttgtgagaatcggaaatcatggagacctatttgagggtaaagaaaaataaactatataaatacggatatatcagtatttttgatatatccgtattttgatatacgaattagaaatttagattttattctttttaaaactccgctcaccatgttgaaaaatcgataaaaacaatgctaaatgtagaaaaaagaaaaaatcatagtagtaagactttaaaaaggacggtagaactactttaagtactacaaattacaacaaaaattttataaacttctacttcattaagaaaaaatcctgtaatacagggctttttaagctaaaacgcaacttttacattttattaattagtgattcagtagttaaaatttctctatccttatactttacagcctcagcaatcgtcagtttttcaattgctctaatgtacttctccatgtaattaaagtctaaattttttgtattacttacaactggtaatcttacactatcacttcttattttggcttttgaaatggagtcatcccaactatattttttagataaagcttttctaacacttcctacaaaatattgttgaattagagggcttttatatcttgaatctttaaaatatagtgccaaattatgactatcattcgaacaaaaatctttttcttgataagttactaccatagtttttccaccaatgaaaacgcaattgccctcatcgatccattctttaggacaatttatgtattttaaaacagcattattgccttctgctgctgtcaagtatggcacattgccattttcaaggttagctacttgactcttcaatatactatgagtattaactacattaaatagatcaactattttaaattcttgaaatattggcttatatgctaatattttcttgtcttcatcagttagtccatagtcatttaatcctgtagcttttaaataggaatcaagctcggcgagccgttgctgttcaagctcggcgagccgttgctgttcaagctcggctatatattgttccatataattaaaatctatttgttccatataattaaaatctatttcatctgcatcagttacaggtagcctcaccttagagtctctaaacacattatccacgtgtctaacaagaacagacagtaacaccttagacaatctactaaaaatggtattaaagtacaacgcaattttagtattaagtttaaatttgggaataattttccttacgaactgtcctgcataccaagaacgttctcgataaaagaaagtcatttgtaacagccccaaactaaacgtattaggttcattgtaggggacatcacatacaaagtctgttgtgctttcaatgccattattcaaagatgttcgggtaacatagtcatattcatttgtacttatattaggatttactaatttagacttgttgataccttttaccttttgtatttcaaataaatcacctaatttaaattccttatacttaaccattctgaccacctataacttgactaaccttccacgatagataatctgccacagtccttttaaagtcctcttctgcaggtgttgtgtcaatttttaaatgctggttataagtccaatcattgccttctagagtgattgtatctttaattactttatggtttcgttcagtatagtaattcgttttaggctttttatcactaacaattgcaactacttcttcataacgttctttggcatgatctgtatcacgtaaattaaccttctgaccagattttttacggttcattctagtatatccatcttcactaaaatctaagaaggttactaaatcatcttcttcatgtggtctagctactttaaatacataaatagcagtctgaacactagcttttccaccaaataaatcagttggcatatgaatagaggcaactaaagtattatttttaagaatattttttgtgtaaggcagcccgttgccactaccagcgttttcttgaataataattgccgcatagccttttgtcatttgtgacaatgcttcttgaacaaaaataaaaccttttccttctgcagagtatggaggatttagcaaaaacacatttgctggaaactgtgtgtaatttttatacagctcatgactattaccattaaccatattgctagatccatctcccattaggatcatgtttaaaacggctaaaatgtaaatattgcccagtatttctacacccagtaattgattttctttaatattttgaatcttgcactctagtttctgtttatcttgaattgtatttttagcatccttaaccataatatccattgcagacactaaaaatcctgcagatcccattgccaaatcccacacaaacgaatctttatttgtatgagctaacctagccatcatattcgttatgtatcttggtgttaaaaccacatcattttgacggtcattatcaattgatacccaatcatttagagagttcaaaattttaccagtaaaatctaaatgcaaatttgattcaagcaaaggaagtatatcattatagacttgcacatatatcttatgaatcaaactttcaccatttttaggttgccataaagcttgtttagtaaaaataggttgtaacaaagccataatcatgttaatttggctattttccgcttttcttgcatttaggaaatctgcaatatgatttaagataatttgtccatcattgtttctttcagttatgtttccttttaattcagcaggctctaactgtgatactccttttgtctgtagccccgccatgattaaaccagtaaaaacatacaatttttcattagttgtcagtaggttttgaattgacttatcgtcgtacaaagcttgatgaattgattttatccttttttctaattcatcctcagtttctaatttaattttttcgagttcacggtcatttagatttagtttgtctaatatgccaaaaagggtatctatattgatttgcttaaacaaatcaaacgatgaatctagctgtctaatatgttttggaacaccagcattagccttagaaatataataagctttctgctcaggatcttttaaattgccttcagcatctaaagtagtcccgttaattccaattataataacttcatcacagtctgagttatctaagatcgcatttccataatgcagagcaccattagtagcatatgtagtaattgcactataattaggatcaccttttttatgtggattttttgcgttcggcttagaatctgaaccaaatttagtcacttgaacaatttgaccagccttgtctaatttttctaacttatttttgccacctttagcttcaatcattactggtactcttcgtgaatgattatcttctaataataattgaatatcaggataattgttgcctgcaccaccagatttagattcagcttgtcgcaaggctgatgtaatttcactatttatttctccagttttaccgtaatgcctaattcctagactatcaagttcactcttaaagtattcttctactttttcttcaattgatctaaccattttattctcctgttcaattcttgcaatggttgattgagttgtatgtaactttttagctgattctgtttggtgttagtcctgcgtttcttcaattaatttatctatttacaatttatgcaaaaacagggtattcattataattagccttaacccagctaataacttgattcatcaagctcgtcattgcatcattaagcgaattttgggtattaatccagtcttgtttaatttctttagcttcattatcatcaagtcctacaacttcaggatcatttaccaagctatttaaattatcagtttcttttttatatctcagaagctctgacttatttagattaaattttatgagataagtcatcaacatcgattcatcaagaccaatatcatttcttcctgcgccaatcgtagtaagtccttgatccacaattaactgaatatcaccatttttacgttttaaaattaaggaaaaagatatgtcgctatcaataccacgccaatattttgtttgatagcttttacttaatttaagaacaggttcatccacctgtgcaatatcatcatatagtgctaatctcaattcatccatctatgtatttcctttcttacatgttatttagattatctatctaataccctttttatgggcaattccactaactataggattttactttttttattatatagcatgtcaacaatagtttgccatactaaatggtttttaggatcttaggcatttggtctttatttaaaactaaatttgtgattcctattggaaagtcgtcagaaagagcactaagtgtagaaaaaaatcatggtaatatgaaggtacaaaagaagaaacatcttgcatatgcgagaatattaagacacacaaaaatcgctactctgtagtccacaaatgagtaacgatttttgtgtttcaccaaagtttaagacaaaaaagctatatgcattggctaaggatagtgacgcttgtgatgttttcttgagttttgcttatggattttacgcctatggctattttgagcaaaaattcaacttttacattttattagttctaattgctaatatacttacttaatcttgacgcaatgcacctttaaccaatctgcagcaaaatacatattctcttctgaatcctcactattagtgatatataaaataaactttaatgcagcgtctttatcagcttttaagtgatatccattttcttgtaaaaaaaacgccgctgcataataggaagtccgtttatttccatcagcgaagatatgctttttagtaatcttctgtaagataaaagccgcttttaaccataatgttggatataattcacgtccaaataatatttgttgtggctgtttaacaacaacgtctagcccctctggatactgcacacctacagtacctttaccagctttttcaagcaaccgttgattcaaatgaattaaatctgttttggttaaatagatcatttattctctaactctcgtgttaattctttattttcttcataaaattgatcaataaagttgtccaaatcaggattaattgaatcaactattttaaacgtgatcttcttaccattaggatcatattctttttcaagaactgttccatcttctacatgaaacttagttaaatcttgcttggttaaacgtacactcaatgaattaccagctttaaaaactttagttgtatcttgtaacattttaatcacctgctttgccatttaattgttataacgcaataatatgatgttataacgtgaatgtcaatcttcatatactttctcctataaattgcttatcaagaacacggctaaattattgccaaggtgacttacgtaagagaaggtcaaatccttagtttcaagataaactaaagctaagacagacccacatagtgagtacaaaatggtatataaatcaatttgtggttcatgtaaaagtccaaaaattaatccattaatgagaacagcaataaacaatgttgattttttgcctggtttactaaaaaaccaattgaaaaaaatacctctaaaaataatttcttcaaaaagtggtccaattgcaatcagcattacattaataattggattcaactgttgctgatgtgcagctatgtttgcttgattagtggcttcccctttaatcaaaaatcctgctaaaatttgcaaaatacaaattactaaaaatccaagaaaagctaaactccaattttttagagtaaatcttggcattctagttttattgtaactagtaaagtgccaatcattcacctgattaagtcttctttggtaaattccgtaggtcaagctcagtaatgcaaccgttaatccaaatataaatataacggcaacccagcttaattgtttggctctaatcataaataatccttgaactaccgcataaataaggaaagttactatcatttgaccaataccaattgatttatcaagaatctttttcttcatttttaaattcctttgatctttcaatatctgatttcagagtccccatagccaaaaatcttattcatttttataaactacctctacttaacaaatttctcatcaaagccaaaatatttaaatttacctttataatctttatttggattaggcttaatctccattcgataagtacctttacgaccattgaaagctacaatttgcttttttcctgccgcaattttcttaatctcttcaggggtccaacgatgacctcggtaagttttcttaaaatgatattctttaccgtctttatatgtaatcactacatagacatttgtatctacaggtttaggattaactctaaagccccagaacctgattttacgtctaccttctttcaattcttgttctatcaattttccagtagccataaagctttttccttgcttatcagtcgcttcaaaactgatttcttcacctgccaacaagctggtaatttcttcctcactaaaaacatgttgtccatattcttttttaaatttaatctctttagctaaaggcttatagattcctttaacgtgatcagtatcttcaggaaactctactttccaaccaactctggtaatctctttacccgtttttttacttttatacgtttgttcggctaaataagccgtatgttgttcttctttaccaaatttttcaatcgaataggtgatttgttttccttctaaagcttcttgctgctccacttcagtagtcgtatgtccatcaaaaatcgtaactggtgggtttactgttttatttgtttgagtaaagactccgctaaatcgttcaattgcttttaaatcaccagctaattttttaacttgtgtatcttgctttaataatggggcattttctatcataactgctttatcatgttcaattgtcttttctgcaactgagtagactatatcttgctttgtgggatcagccttaatttcatttaaaatatcctgcaatcgtttagtgattttccctgaagataaatacgttcctttagctatgcaagcaatcaatgctccagttcctgttacttcaaatactccctttacaacttttaattggggaataacctttttattttctttaccaattgcttgtaatttactgattgtttgcattttagttgcgccagtacccaagttccatttatccaagttattcaaaatgaaagttaaagtaggtttagttgggggcgtatttgtaccttgatatacttcagggctagcgttttgagtaaaatgtgtagccttattttctgattgcttttcttcatttaaatcattttcgttaaaaatcagcttatagtttagttccttaggaacattaatcgtactcgtaaaatcaggatggtttgcaatatgggctttaacttgagtatatacatagtcctcagctaacattgctagatatgatttagcaactcgttcataaatatctcgaccacatttaccatatttgtcttcaacttcttcaagtgattgtggtactaatttggttggacgattggctccgtgatcctcactcttaattatgaattttttgcgtgggtctttatgacttaagagttttgaatcaattccaacgactgctgcaattttatctgcatatggtagtaactcgttaaaatcatcaatcgtaattgcgttgtcttctgttctcggataagaaacaatcttatcatcatacattttttgataagtctcagtaatttgttcagttgtatattccttttggaaaatcttacccaagtcagccaagttgactaactttggcggctgggttcttttttcagttgtgctatcaataataatttgatctgttgcataatttactaaatcttgttctgctaaacttttatctgaaaaacgccagctgtctccgtcttgatagtcacgcttaaacgtattgccattagcatccttatatcttatttcatagaaaggcttttttacgtatgcccttcttgctctattttgttcatcaactaagcatgtaatatacgtctgcaagcgtcctattgaaagcgccttacctttattactataaccctgttctcttgccaactcagttgcaattcttgattcttctaatcctgttagaaaatcaaatctctgtcgtgattttccttttactaaaattccttgagcatcttgttcactaactgtagccttctcaggcttatgtaaggaatcaattacatagttagctgagtcatcacctttaaaacgaattcgccagacttcattttgccagtttaaataatctactatttcccaacctaatacatcaccttcaccagacgggtcattatcgcttgcaataataattacatcatgtccaggcaaattgctcttaatattatcaatgtatctttgcttggacttaataacttgctttgaccaatttaaatcgagaggattccaaggaaagttatctaaattctgccaatccgcatatttagctgcaaggttgggggcaaccatttcattaggcgcattgagttgtaataaatgtcctgcggcataaacaatatcatagggatttccttcaaattcgccactcattccacctaaataatccgcaaatttttctgcttgagactttttttcatttaaaataagtaatcttgtcacgttactattcctttctacaaaaaagaatacctcacggtattcttcacatagcatactcattattcaaaaaaattaattaatggaggcaactatttctaaagtagttgtacaattgttgatcattgttacaattgaggtacttagaataccaataaaagtcgattcccttattttctaatctttccttttctttttgataaatcttatcactaattacataaccataatttttaatccaatcttgattaatataagtaataaagtcgcttgcctgatcatactttagtttttttacgtcaaaaccataattaattaatttctttttgatcacaactaaattatcaattctgttaagttgagctggtttaactaaatcaatcacataataggaattaaacaaacctcgtaattccccttctttattaggtctaacaacgttgaacaatatatcttctaatcttgtgacttctttcataactgcctattatttctccttaccataatataagcatctcatttatatcatatattgaatttatagcatacgatattgcactaactaaaagagactgtaaaatagtttgtgtaaggatgaatgattccttaaatttatttctttaaacattagaaaaaggagttcctttctcgtatgattggtttgaacaaaaaaaacacatacagaaagaagaactccttcatgaatgattttaccaaagattttgctcaagctctattcaatccagacaaaataaatgatttattgcgcaaagagctacaacaggctgttaataacttgctagaagctgaattgactgcctttctaggctatgatccctatgccagaaatggctggaatactggcaattctagaaatggtgcttatttccgcaaggttgatacgcagtttggaccaattgaagtgcaagtgcctcgagaccgcaacggtcagtttcatcagcacacgctgcctgactacaagcagcactcggatatcttggaaagcatgattatcaagctttactccaagggcgtgaccaccagggacatagccgatctaattgaaaagatgtatggcagccattacagtccagctcaggtatcaaatatttccaagcagatgattccaaaggttgaggcttaccacaaacgcaagctaagcgacaagtttttctgcgtctatttggatgcgacataccttcctttgcgccgagaaacatttgagcgtgaagcagtctatattgccattggcatcaagcctaatgggcacaaggaggtcattgactactgcattgcacctagcgagaacattgaagtctggacagatatgcttcaaaacatgaaatcccgaggcttaaagcaagttgagctttttctttctgatggtgttgttggcatgaaaacagccttggccaggacttatcctaaagctcattttcaacgctgtttggttcatgtcatgcgcaatatctgcgctaaagtacgcgtcgacgatcgtgaaaagatcatgaacgaattcaaacaggtgcatcaacagacaaacaaagaagaagccacagctgtcctgcatgacttctataccaaatggggcaaggtttacagccatgttatcagaagcttgaaagacatagaaccagatctgctggtcttttataactatcccaagcagatcagagcttcaatttattcgactaacatgattgaatcatttaacaatgtgatcaagcgcaaagctaagcctaaggcagagtttccaactgaacagtcgcttgatgcttttattggcattcaggcaatgagctacaatgaccgttatttcaatcgaattcataaaggctttggtcaggttcaggacaccttagaatcctactttgattaaataaataattaaaaaatcaatttacgagaaagaactatttacacaaaagatttgacagtttcaactaaaaaaataaggcaccagattatatattgttgcttatatattaagcataagtaacatatatactaattataaacacgcaaaaaacagccagctctaaatacaataactttaaagctggctgttttaacataaaattattttttagcggttttacgaagaaacttaactaatctatgtgtgtcttgatcacttaatctacctatataattaacattagtatcttttttagataccgaataacgtctataagtatcaatccacgaatgttttttcaaacctgtagtttcatattcttttatttcgaaataatgctttttaattttttcggatttattcttaaactttgtcgttatgtcaaagaaaaagaacttatcctcattttcttgtaatatgaatattggtcgtcttttaccacctgaaatctgaacgaagcgaacatatactgtagcaatatttttactcatcttttgacatccattcttgcagtttctcagggctattcaggtcttctgttgcccaatcttttgttaagttttgaatttctaattcatctttctctctttcagttaaattggttgagaatggtaacccattctcagcaataagacgcttatagaacattgtgatagcaatagtaggtgttaaacctaatttttttagaacagcattaccttcttctacaacaccatcatcaatttgtacttgaattctctttttagtaattgaagccatagtagtgcacccctcatatcatttatactgatattatactactaaatcaatggaatcaacctatataagagtaatatttactcaccacttgttcaataaattactaactgctttgcaatcctcatatcaaattttgcatttttgatattttttaacgatctaattcctgttcacctttttgaatagcaatttcttttgctttttcattggtcagcgaactgtttactgtagcaacatgtggcttgctagtttgcacttctttatcatcaagcaatttagacttttcttgatttttttcaatttcattttgtaaattgtcggttaacttgctatagttgccatctgctgtccagcactgcgttttattaaatgcatcatccaaatttctaactgtatctattgtcatacttttttcgatttttcttagtgccgtcaattcggtcttaaaattagttccattagtctcattgtcagtaacttcttgctccattttttctttttgcacataccattgcgagtgttcaggagtatctaagaagttttccttgacaatttgacccaatttttcttgttctttttcgagtaacttatcggtactattagttagtgtcttagtagctgaaccaacatgcgtcaaaatttgcccttttaccccacttggtaactcattaaacttttgtccgttgcttgtccaattagctatataatcaactgtctcttgcttaacatcaattccataatgagaacaataaagataacttgtaagctccgcttgcatctcttttaattctctaggcagacccttttcttgtttttggctattatgtagctgtgcatgtcccaattcatgagcaagcactgatacattctccgttggagtgttgtatccatttaacacaatttcgttagtagccctgttaaagtatcccttagcattttgcggatccttatatttatcccgaatatctgcattaaatgggtcataagtaatgactggcattttcatgtcattagctacacttcttaatccattctctaaggagtcaatctgtcctggattcttcatattaaaatcttggtgtctattagggtaaagttctgggtatttttcctttggcatattggtttgtggagcatcgaatacagtgccaatcttataaaaagttttttggtaagtttctatattacccgcctcaattttttgtttttcgtctttagtggcagtctttaagttagctaattctttgttgccatccttatttttacgatagaaaactgtagctttagtaggaacaaatattttaattcctttttcacctttgttgaccttatagcccatgcttttaaactttgcaaatgatcccaccgcagtcgcacctgggcgctgcatctgaatcgtcattgcatttcttgaggaatagttatgaaacttatccataaaatcaagcatttctataactttctctggtgattgagtataattatctacttctttaagtagtccattttttaaatcctcaacggtttgagtatgtttctttttccaagctttacggtcaaaagtctttctaggtcgtctttcagactttaaagcatttttatccatatccattttatctttaacttgacctgatactaattctggttttgatttttgaaggcgatcaagatattgtgactgaagtgaaatatcatcattaagactcgatatctctttatcagttaatggtgctgcccaatcagaagtaaaactagatttattccaatctacatctgctaaagttccactttctttttcactatcaataactttttgagttagtggtttaataccatttcgattaatcgtgtgccattgataatttccttcagcgtttggtgaaaaaagataatgatactctacatctgaattaagatacttaccgtcattctttgatatatcattaatcatcgcagataagtcatgatagttttttctagcaggatcatcgattctttgtccattagaattatattcatccataagtttagtagcagctgtaggattttctggaatatggttatcgttatagttccctgtttcaattaactttttggcatcgtctaaagtacgataattatctagtaaattttgtcctgtgaaagtaagtccaccatccatatgaaaatactgagtagtaactgaaccatttggatttaaaattgatacatttgatcgtgttgacataatttttcctttctaagaaaacaaaaaagacgcttcataatgaagtgtcctgactacatacaagttatttagtttttactactatcaccttctttctagtaattttaaatttacacgtttctgctgaagataatttactgtcttagctgagaataaaaaacgctgaagttttgataattcaatgatttcagcgttttttataccatctatttaagccttggtgcgattctttaatgttacctatctaattcttgattttggtagaatgatttaattcttttagtttttaggtcattaatgtcaatatctttttgcgaaatttcgttgctcaaatgatacgcaacttcgttcttactaggtaaagtttctatcattcggtccaaagctttgtcttcttgttctctagtatctgcacgataaaatctcatgaggctaatcataaattcagcgtggtctatgttgtcaaaaggaagggttaaataatctctggtttcccaggtatctcgagcagagtttgcggcaattagcgctgttcttttatttccgtcctggaatggttgaagcttggataagcttgcaaatactctccacgcatctttagtagtctgtttagacgagttgtattgttcaattatttcatctaagtcttcggggtagacgttttctggagcaaagtatgcacctttagctgtgcctttagggtctgtgataatgacaattgcgtcgtctggattataacttacatgtcttaagcgccctggaatacttgggtcttcttcttcgctatgggtaaaggctttattaatttcaataattccttgtcttgtaaatccgaatttctttgctgcagctatgccatctaaagcatcttttaagatggcaccatcgtggtgttgatgtacaagcttagataggtcattaagatctaaggctctttttgtttgcaacacagtactactgtagtcattcatactaccaaaagagactatgaagtttgcaaggtctagtttttcactcatttgttctcacttactttccgtttagttagattacttacaattttagcactatttaattaataatccttgttttttgagcggcacatacgcaagcggtatgtgcttctttttttgcattaaattagcagctagtcactgactaactgctttttctatatgcttatctttctaatccttggtctcttctcaaataagccgatcgcttttcaaattcttgtcctggtaatgttctggttgtttctttagattgtgcttttccttcttgcattttccgaaaagcttttaaggtgtcattccaatctttacctaatttttcactaggtttacagtatttaactttaggaaatttagattgaatatctttaacaaatctttttccagcttcatcattatctacacctaaacctacacttttaagaattcgaccttctttttgtaattgtgctgctgtttgtgttatatacgagtcaaacacttcttttttaaggccatccattgaaacaaacctagtatttttcattccaccctttacttttaccttagacaagtcaaagaaactaattgcatcaattggtgattcaaaaaatctaatattttctggagtttttccattcatacctggtgaatcgaatgaaaaaccatatcccttggtagaatttttttcaatcattttgagggttcctcttctaccatatttttgatgattaattttggtaccttgttttgatactcctttaacttgtcgtctatcttgaggatcaagccacaaaaaaagtgcgttacctaatttatcttgtgcaagcactttatctttgtgtaattgatctattgtcttacttgaaattccacgctgattatgtaaatatccccaaactcgattaattttgctttcggggtctaactgatttttatcaaacttgaaaggttcttttttaatttgataaactttgccatctcctgcgccgctagttaataccttatccattgccttaagaaacttttctttttcatttaaattgctaccagacaattcatataatgtagaaaaacttaatgcaccctttccatgaacctgtcttgaattccagtaaaacgaattcttagatggtgtaatcaccaatgaatcatgttccactcctttaaattcatcactacccgtttgtcgtaaagcaattcctgcacttcttgcatattcaacaatacttgcagaatttgctgctttaatttgttcttttgtaaaagcaagcatttcaatttctcctatctttaacaataaaaaaacaagtagtacaaactacttgctaatttcccacctatgcccgactaatatttttagccaataattaagatgatcttattctaattcttgctcaacttcattttgtaatttttcaaactcacgtaaattctttttagtttctttatctgcatttattttttcgaatactttttcttgattcgattttatttttcggatttgactttgactaataaaaggcttttttaaataattgtgtcttttgaaagactttttagactttgcacgcaaatgtggtctatatgaatcatctaattttgacttttgttctgctgcatccttccgaatttcttttaatgcagattgaatgtagtcatttggatcaactttatctttaaaactgatcctgtgtctttgattgtggtttgcttccttatcgatttttcttaagtcagcaagcaacgcattaccatttcttgcataaataccttctttgccatacagttggttgattgcataatttttattttcacgtttacttttaccgtataaagcttgtcggtcatcctgcattttccaaactaaatctttatatctttgaaagtcggaattatcctttaacaattcatcaaccaaatgatccgacattttttgttggcttttatctaatttgttgtaaaaccattctcttcttgactcaggcaatgctctaacaaattgatttatctctgcttgaaaagttggctgttcaacttgactagtcaaattaacctgaattgcttctctaatagcttgacgtctctgagataattctttagtcatctctgaagaaccaatcaactcattagcaaaaccacttttcatatgatcaattattttttgtggtcgcctacccttaggttgactaatcccttcacggtttataatttttcttcttgggtctttctcaactgttgcaatgtgaatatgaacattatcagtatttctatgaatggaagccacccagtacatctcatttaatggtggatccatttccttttgaaaaatactctgcatttttttagttgccttttgtagttcttcctcatttaatattccagttgtactagataaaatccccttcttttttaaaaaactattatcaaaactaacaacatcttgccacaagacagaattattctcttgtccttcatttaattgctcacgaatataatctaaatctttcaactgaacaatatctttgtcagagctaaatactccatctaaaactttttctttggttggatgaatttcactcagcttacttgcagcttgccctattctttccaattcagtttgttctttggtatttagtcccgtttcgttctttttctgatttaatgcatcaattcgtaccatatacccaagatacttatcaaattccttatcattcaaatcaaaaaaatttctcttttccattaacttttcagcagctgcttctcgttcagaatgttcttcactttttactctagtaaagttgttttcctgatttaattttcttacttgttttttaactcgacttaattcatctttttcttctgcagttaaaaattctttttcttctaatgcttcttttctggctatatatccaacgtaacgtccaaaagcttttcgtgaactcggcacagaaaattttgaagttaaaattatagctggtcgtcccaaaaattacctcctacaaataaaaattctataaagcaagttgattaataattattttgctctttcaattttaaaagccgtagaatcgcaatctcagcatcaaaacttactcaagttgtccgccattttcctccattctattattaattctttcttttacttttctctttgcagatttataaacttctgcatcaattccatttccgacaatttgcattccttgagtcatcaaaaactcacttaccatttctgttagaattgcaacttgttctttggtaaatcgctgttgttttctaatatcacttaaatcttttgtccacttagaatttttttcattttcttctgctaacttcataagatgatgaattacttcagcattattttttaaatcgtgttcctctttataatcttgaatccaatctaaatctgtatcagaaattgtcgctctaaaagttgtcttaatcattttttctggtcctcttaatcagcgtaagtttcttgtctttttttcaaagcattatcaatcttttgattaattttttgtaactcttccagttctttttctttttgaacacctaacatggcattgaagaataagaacttataaagttgaccattattatcaaagcaatgttcttttctaatctgcctaatttcttcccattgcttatcgttgagtcgaaattgcaaaaagtgctgtcgtcccatttcttgccctctttctaaatttaatcatcttcttttgccgtgtcttctgacaaactatctaacaaatttaatgctcgttcggtgtcattaacatctccactaatgaaatactttgcaagaacattcagccctaataaattttcctgcagaagtttattctgcttctgaatcaataaactagtttgcgaatcttcattttgattttgaaaattaattggaatttgttcaatttgttctctcaaaaattgatttctggaaattttcttacttgaattttgatttaattgattaacaatccgatcaattctagccaagttttgttcgctgattccacggattaaaacttttaccataatttttctttcctctgatttctagtttctagttttccttctagtttctactctgaaatttgactaaaatctgcttcttttagttatctctagtaaagagcataagggaaatctgaccccacgccttttatcaaggtgtgctgggcttggttgtaccaagcgatttcgcatttttagaagtgatatcacttctgattaatttgacgtctatatacttctaaattgttcgtcttttacctgacattacgtcttgatacgtaatgtttttttgtaatatccgaacaggacgtattcttacgtagctcattacgtccaagacgtaacattttttgctctatttttgagtctagttatcaaaatcaccgtccttaatgtctctgattgtgtcttcatatttagaaattgcttgctgactttgtgtgatagctgctttgttttctgaaatatcattttccaaactactaatttgtgtttggtaattttctttttgactatcaccaactttttctaactttgcctttgcagaatctaaattattttgagaattttgaatcgtagcttgagcatccttaattgtattttgttcttgactaatcttctttttattccaattaatcagatattgacgataatcaaggatatagttttgatagctcttagttactttgcttgaagtcagatcaaccttattctctttaatgaagaactcaatataattattttcagagaaatcttgcatgttaactcgcttattaactttttgtggcagaatatcaacctttaaatctccaaagccatttttgattccgctaacctcaattactaaaaagtgattattgattttctgtgatttgatcgcaagctcttctccatcttctccgccacgtgacatgtttactactcttatagcatactttaagttgcttaagtctgaatcgtcactagtagatgttacgtctgtagagtccccaagataatactctagcaacatcttttcgctttgcttattgtaaatagaatttgctaggtaaaatgatgaattgcctgtcactacattaacagtttgctcagtgtcaattgattttcctgtccaatagggactagcaacgattgcaataaaaattgcagccaccactccaatgaatgataaataaattttgcgatacttatgtttttggtgtcgcttcaattcatttttgtttttgctttgaatcattttttgcctttctaattgtcatccgaatgtacacgatagtttttgctatcatttaattcctgttttaattcagtaatctgctcctgttgatctcgaatttgtctttgactttctgaatctggattatcacgattaaagtaaactgttgccattagttgtgctgctgataacaaaaacaaaactaaggcaactaatttcaaacgatgatttgatttttttagtttagttttttctgattgatatacaattcgactagacatttttaatcacctcttatgacctgatctatcttttctatgttagttcccgtatatttttctacttgttttccatactttaaatggataaaagttggtaccttagttaacttatactccgtaatatagtgtcggttttgtggttgattagtatttacaaactgtatattctttctaaataaatcttttttcattacagcgtatgaaaaaatagaacgacagcttttgcagtcatctcgataaaataaaactgttgagtcatcattagttttgattttaacgatgtttttttgatttagttcatgattaacatgttgattaaaaccaataactcctatgaacaacaaaaaaatcattgcacaactaactgcaatgatttttaccttagtttcttttttcggttgcatcttaatctgcctcacgatcaatttgatagcgaccaaaatacttaattgaagtaatttgattagtcgctgtatcataaatcagctggtaagcatcagttggtgttcccaaagttctatcatcttttgtcatttcaaaataaactttggcatatacaggcacttggttattttctaaaatacctgtcttcaaatctagttcatcaatctgacctgtcatatctgccccactatattggagctctaattgcttatcatttttaaacatagaattgttctttaagactttttcacttactaaatgtgtatctttcaccttgtctggtatttttaatttttcatcaccactatcatacgtgtaaagcagttttagcagtttacttacctgtttcttggcttttgtctgtgctacatcctgctcagctagtttctctttgctgcctccttccttcatagcaatatgcttttgcgaatttccaattttagcatctacattttttaactcatcttgctttttagccaactcagttcttgcctgatcaacatgatagtcgatagctttttgcttgttagtctcataattgattacgcctaattcgagcatgattccgaggattgctccacctaaaagatattttttattcatcttagttcctctctatgttgatttctttaaagctatttattctttgggtcttaagattataatcaaagtcccaaccataagtaacttcttttttattggcactttcgactagggttactactgtaatcttagtatgacttacatctgttaagtcaccaaagtaaaccgttgtactcttgtttcttaaataaccataagaatctccattatttttgatgaagtttttgccctctttacctggaaaaatttttgtccaagcactaaattcttctttttgtttagctgacgaaaattttcttttagtatagatagctggtatcacttttagaaacttgtcacgtgcctcttcttctgcactcaccacatcaaacttttgtttatatgcagaattctttgtttgactattttgctcttgaactatttgcttctcaacagttttaatttctgccctaatatcattcagttcatcatttttaggaactctggcaattgcaaacattcccagaacagcgaataatactccagctgtcatcatccatactttcagattggactctcgctcctttttctgctgcttcatctttatccttctttcttggcattaataccaggtatgtttcatccagaatttttgtgcattacgccatgaaccatatctgccttttacatatttatttgctacccttgtttgattcttatgactgtaatcaccattaagatattctctctttaattgataacgtccataaacacttgggttagctgggttaactgcgtcccatctacctccagattctctctgaacaatccagtcacgtgcttcagattcagtttttgataagccatcatcttcttcagattctgcatcattgttcaaaccatctttaattaatttaattgggtctttccaagtaccatcatctttgtacgcagagagctctgcggtagcaaaatctttttcagttgcaccaatgtgaacgtgagtaataccatgtgcattacttgctaagtgacctattttatctcctactgaaactttgtcgcctacctctaccttgacgtatttcaaatctgcttcatcaaagccgaattcctgataaatgacattccaaccgtcggagccttctacccaaacgtacattcctagaccatcttgagtatgtccttgaaatgcaattttcttaacggttccaccatgaattgccaaaatatcttgtccaccatatggaacagtaccaaagtcaacaccatcatgaaagccacctgttcttgtagatgacttaccaaataattgctcacctgagattgtattacctggtccttttttaggaattgacttgaatggccacccccatttgccgcttattggcttacaatcttcctcagctgaattatctgagccactagacccatcacctttagctagtgatttattgcctttcaaggcatcatattttttagcttgagcttccatacctgcttggtaatcactttcagctgcggtatagtatcctgcttttttcattgcatgagcatattgagcaactgtagcatcttttcctaatccagcttttttaaaaccattctgaaccgtcacagcccactcggtcgcaaaatcacttaagttcttgtagtgaacgtaattaccaccttcactaccacggctttcacctttggtaccgatagtgcttccttctgaataagtcataccaccaaagttatgatcatgtttagcaactgaactatcaccattacctgtttcctgtcccatttgagcaaaaagtaatctagcactaatcccagttttctcatgcacagcatccgctatatgcatcatagcggtctgtccatacttaggtgattcaatgacactaattcgtccttctactactcctccttgttctcctcctgtatcacattcatcatctgtagcagctcccattgctgcaattaaaattacaataaaatatataactgataaaacagctaaaattcctaataaaaaagcggctaatccagcccatctttttgtctgtcttaaccgcttaatacctgttatcattattgaccacctgcaaaaatttcaagttgtcgttcagatggtttcatcttgacttgatatctttctcttcctcccatcgtgacaattgcttgtcctgtttgcaagtcaggaatgttactgtaatctgaactatttaatgcttcgcctaatagacttttgattttcttaagttgagatggatccatactcattagccatttgtattggcaaagttcaaaaaccacttttaaacttgatagttgagcagattctactgaatcaggaaccatttcttcgggtgattgtgtcgcaaatataatacctgcattaaactttctcatttctcgttcgaagtttttaacataatcaaccgcaaaaatattttcataatttatgatgttatgacattcatccaggaacacatcaaaatactgtacatcttgacgtgtgattttccctgcctttaacagagcattctgttttctaccatttatcaatgcatgactcaaaattaaacttagagccatatacaattgtgcctgataaacattttgattcattgttgaaatagcagaagaatcaaatagtagaagcttagtatctgtcaaatctctcattgtagaataaccatcaaataattgaccgtaattctcaatcattgattccaatgctaccttgattttttcataagttcttattctttcagcagtaaattgatgttgttgatagtacattggcgtagccaatttttttagccaatttaaaaactgactaaaagtcgggtatttttcactatctaaattagtaatttttatatttcctttattttgttgaaaatttctaggtaataatcccatgtctacataaaatccacgtaacaatgaatcaaattcttgcatttcaatatttacaaaggatcccttattaatcatttggaatagaatatctaccttagaaatatgttggtaaaaacttgctagctcatcaaccttacctgtattttcatctacagtagttgccattacttcaagtggattaatcataccttctgatccatccaagctaaccacggttccaccataatgcttaattaaaggaatatattccttagtcttatcaattccacgaaagtacatatttctagcaattgtaccttcaaccaacatcttcattaaagttgatttaccagcacccatcttacccaagatcatcatattaaacgatcttctgatattagttgatctaaattgatcaaaataaaaggctcccccagttgaagtacgacctaaccagactcctctagggtcctttaagctttgagctgaaaatgggtcaccagctccaaccgttaaggctggaattggttgttctggcaatgctgctaaatccttttcttgctctgtgattggtaatgccattgatttaaactgtttatcttgcataaacatataaacagcaacgttataaccctcgcctcgaagcttgccacgaagattagaaactgattgatctaatgcttcaatcgttggagcatatacaaagattctggttagcattaatttgggaatttcgccaccttgacttaattccaatgcatatttttccaatgattgcatatctttttgtgcatttaaagcatcagtggcttttctagcattaacttgccggtcagctaattcttcaattgatctattcaattgccgcttaatttcatagcccgaatcagttttaacgtcaattgtagttaatgttgaatcgtttaatgacacttgagtaagccagagcaaaagcggatcattaggataatggattacagataaacaagcagcatatccatcacttgcaattgcataattatccgcaaaagtaataccgccctgcggttgtacttctgctagaaacttagtattgtaaccattttttagtaattctctttgctttttcaagctggtaacttgtcttggatttagctttacagttacctttttcttcttgtgtctctttgttttcaataaactagaaattctcattttttctcccttacttactattcaagttgttttctctaaagagtactttaaccgtttcttcatagtccaatggtctcaagcccattaacccttgatcagcaaattgagcggttctagtgttaactctaatatcgtgcaaatcttctccaaaaatcataatgtaaaactgcacatcagagtaatcttctgtatttcttgacagcattactgattgcaacaacatttcattaactaatcgtaaacgcattttttcatatctggttttgggtgaacgaatcccattctttaaatggcgaaaatactgttgttgttcactagtatcaattctcgtcgacatgactacaattttataatcgttgctataaatccgattaaatgtagtaaatgaatctaggtatttacttctggtttcatcatcaagtgaatataaatctgtcgaatgtacacgcaaatagcgtgcttgggtgccatctactaaatcaagtatcccgtcttttgagcagttactatagcccaagtattcaactattgattgatctcttgcatcttgtcttgatcctttatctaagccaaaagctctaaacaagctaggagctttgctcctactgtttctactttttctttttgttcgcattattttctccttctaaaaataatggataatatctgctttggtcttgtcgcataatgcttaacaaaacacgataatttctaatctttggcgctagaggggttcgcattactagcagaattcctactacaactccaaaacctgtcattactaattgccaagtcggttgtaaattaaatagaaaagaaatttgttgtcctgccatacccccaatgaaaagagcaaaaacatcaaacatatctaggaaaaagatttggatagatacattagttgacttaggaatcattattttttgatatttatccatgcactaatcctttcttctgctatctccatgacctaatttgccaacgttggtagaacttggtgatttagtctcagtagagttttcaacttgctgattgattgtggtcttatcatgcttaatttcagtcaccgtgttggtattgccttgagtttcaacggttctattagtgtttgaaggtacgctgctcttcatagcatcattcacactactcattccttgattgcctacatcatgagtagatacttcagttctgccagcctttctttcaatatctacatggttggtaccagcagtttcagttactttactatgactgtcttgtcccttaaagtctgaaacattgcttaagtgtctaccgccttcaccaactggttttggcggtgtggtttgttgatttgaacggtgttgacttgctaacttactagtggatttttgagtatctctcaagcttggtaattcatcgatcgcattactacttgttggtgagcttgaagagctatttgcttcaccacgctttgaacctgaaccagtaactgaagcactgttagttctaggatcatttgctgtttcttttttaccagtctttgaaccattcgttgcttcaccaactgtggtatttggaatttttgcatcattaccagttgtcttagctccacctgttgacttaatagagccgtcagttgaactttccttagcagcatttgatttaggcttgctatcatcggtcttaatgccttggttttgaatattatcaggtttaactgatgtattcttaccttggtcatttacatttttagctgaatcaacattgcttgttgcaactgtttctttcttgccatcatagtttggatttcctacaaatgaagtatcacgtccaatacctgttggttctgcactgccaccattcttttcagctctgttttgcatgtatggattatgatgtaaagtgttgtactgattatcagttaaaccaccatttctcatcattctagcggcttcatcttgtacagtttcagatacagcgccagaatttactgccctgttccaatcaactgcactgccaccattctgcttaaagtcgttatgagctgaacgaaaggctcttcttgcataactgccagcttgttttgcttcactattgcttgctccattttctttagcaatagccttagtagagctaccagcttgccaagcttgagcttcaccaatcgctgcccctgctaacttaccagaacctctggcaactccaacagcgccttcagctaaatttttacctttaccagcaatatattcagttgctgcaattcctccagcaactttactccagccttgcttaagtccagtatccaaaccaaagaatttttgaaccttgcttgaaccttcccaaagtgcccaagttaaagcaatcattccaactgcatatagataaggattatcatgaatctttcctgcatctgatgaactcatccacacagctacaattctatagaacgctaattcaaagccttggaatgcaattaacaacgctgaactaaaaatatcttgtaccgcagctttagtacgctttccagtttccaaatcagtggagaaaataatgattgataatacttgcataattgccaattccaagaatgctcttactgaaacaaagcaaactagtaagaaggcaactgtcattgaaaataaggcaactacaactgggaagaattgtactgaatatcgttcatacccaccgttaaaaattttgaaaaaggcagtattgctttgacttactttggttgcataatatcctgaatatgcttttccctttacatttgatttcgtaccaacgcctgtaggagctaatttataacgcaaattgtcagggtcccatgctggtttttccttagacttatttgctttattacttaatttctcagctaaatcagctgaaatagtagttgataaatcgcctgatgttgcagtatcaaaatcagacttgttcatagcaaatgaaccatagtgaacatctttttgtctctggtctttaatttcaccatttttatctttagaaacaccttcccatttggtattagtatccccattattgattttgaagccactaaaattattagctatgattgctaataggtcattagaattggcttgtactacctgatatggcaagcttgacgtccctttatcattatcagcctgtacaaagcctttatatacacctgtagactgatcaaccacccaatttgtaattggctgaatatttccgattaagaacgctgaaattgctaattgccaaacgacattttttaattgaggagctttacttgaggtaccaattttaattccgacccaagttaaggttaaaatcatcaaccctgcagcaattcccattaccccattaattaaattagtgtttaaacctgtggattttaagattcctgagaaatccaaactatctgttgctagttcacttgcccaattggcaaatccataaaagatcttaactataccccattttgtctgattcaaaatacgtcccaaaaaatcatcataatgtaaataaggtgccgcattttgtagagcttcagttactttttgtaatttggctggatcataatcacctgaattggttgatttttgccaccaatctaccaaactactaaaaatatcaagatactcaggattaatgaaactagttaaatagaataaccaatttgtcattaatttttcctttctttaaacaaaaagataagtagtcattatcgctacttatcttgataatattcattaaagctttggctaaattcctgtgttaactcattcttttccttgttcttatcttctaattttttatctttatagatgatattaacaaaagctattgaacttggtttttgtccttcaggcacatcttttaattttgtagcctcgttcaatattgcttgttttgttccatcactaatatcaccatcatgttccgttaaccagttcgtgataaatggtggaatctgattttcttcttcctttaaagacttcttcatttcttgttcttccttagcatctttagcagctgcttgaacatttgcgtcactttgacgatattggttatatgcctgcaaagccaaattttcttcttctacaaatacatttccatcttcatcttgtttggtaacttgttcagtccaagttaaccatttgctccaatcgatttctaatgcttttaaattaatattggcatgtgcatcaatcttttcaactaaatctggattagttttaggattaaagtcatcagttaagaatgtatgtgcaaacggcattaatgtttttcctgtgttaaaaataggatgtgaaactaccgcccagccccatttattcattcttgttaaaggtctcaaaactagtctttcaccgccagctaaatgttctaatcgttctggtagtatcaacggcactttatctacgctaacactaacatttttggctaaaccattttgatctttagaaatattgcttgtctcaatcgttttattgccacaagcttctgaaaattctttgttagtagctgaatcagtagacataatcaaacatttattctgacaattttctttaataacttgtccgtcttctttgccatacttactgtagagctgggcataagactggataactaaagtaaatagaatattacgacctgctgaaactgtcataatccgatccatattctgcagcggaatcatactaccaaactcatcaaaaatacattgtactcgtctaattgtacttccaccttgaaccagccgacactgacgtgataattctgtatataattgattaacaaaaattgtagctagcaagttgtttgaagcatctgaatctggaattttcataaagactgcaattggcttatcactataatgcatcttaaagttttccatcttaatttcaggttttcctacctgacttacttcaacctttttaactttaggattaatctttaacttaaaagtattcttcaaacgcttatgtcctgcaatagcttcaatttcaacaaagcttcctgtttttagattgacatcaaagttgttttcaacaaatcctttttgactaacacgaatctcattcgttttcagttttttattatgattatctctaaaattgattttaattaactcaccatatagtcgttgatcaagcaactgaaactccaaatattttggaaaaccaattgatttcatttctagtgtgttcatactggtcatgcgtgagtttttcggtaaagtgaaaatatctagtttctgtacaacagttgaaaaaattgagcctcttgccttatcatctgagaaatttgtggaaccgaattcttttttagcaatagatccctgttccaaatgcttaaagtattcacttaaaacgttgtgttgagtatatggatctgatggattagtataatctatctgtcctaactgattaactaaatcagcgatatttacaaaagtaatatattctggatgggcttttttatctctaaagtttttaggattcatgcaatactcaatcaaagcaataatcataccattaacagctgattgtgcgccgtcattaacccatttgttttgacctgcttgtttatcaaaataaagcgagtaggtaattgagttaactaattgcattgctccttcaacatcaccctgctcccaacttctaatgattaactgtagtggattaaatgcgattcctttgtttgggtcatctaaatttaattcataaacatcatagccacgcttcctcaacgtatttacagaagcaacatacagttctcctttaggatcattcacgactagtgacgattgtttttcagccctacttactaggtcgatttgttctaatatagtagtttcacctttaccagaccgtgaagtacccacaatcaaattatgaactgtacttgtatcaatgaaataatagccatgtttagtaataaatggaaattttttggttaatcctaatctattaatgtgagcaatggggaacccaccaaaacctttaaagctaggctttttaggatctaaccctggttgactatgatcaggaacttttacataggtgtcttctaattccttaactgtagtaaaacgggcatttcccttttgcccatgagcgactttttgactttcaaagtggaatttttgacttaacaatccaccaataattacgctagcagcaaatacctctaaaatttccatgggcttcaactgtgtcttaaagaaattcaagccagctaatcccgctttatctaaatcgagaccattcgtgaataagttatagtttttacttttaatttgtaacatgacattatggaatgctcctaataaccacattattactagaaagataaaaattcctataaccaacgttgttatcagcttcgtataattaaaattaatattgctagactgcttgttttcatttttgggacgatgtaattgtctttcaacttgatacaagcctttttttacaagattcttttccttgtttctagcattttttagatttattcgtgatcttctctttttagtacgcatatctaactaaccacccatcttgccaatcagcaatatcatagaaagccaatgcgacagcttttttagctgagttggaaatttctgttcgctgatcatcagttaaacttagccaaatatcccttgtctgagctttgtcttcattagcaatggcactgtacaaactagcaattggatttgaatatattgtagcaatcttctttaaatttcttgcgtcaccttgccctaataaaccatctagcatatctctcttttgtgcccaagtcttagtttcacgatattgttttaaaatagcttgtgacctagttaaataagttggagtagatttagtctttgatttagcattagttttttgatttttagcaatatcttttttagcagattgcttactacttgattgcttgtttttcttgacatgcgagtttgaacttgatcgttcaattgaagctttttgttcattattagaatggttattagtataagcccatgtaccacccaaagccgcagctgcaaggcaaactaatgagataatttcagatttatagtgatgtttcttaggactgttatcctcggtttctggctttaactctgaatcttcttcatttgattcagaatcaattggtgcatcatttttcttagtatcatctaagtctactatttcaccatcaacatgtggcacaggcactaaagcattctttccatcattatttaaagtaatttttacgttaggattttctaaattattttgagtaattgctgcagcaattgctttcgcaaattcctcaggcaactttgccatattttcttgttgcaattttgccaaagactcattctgctcaattgctttttgctttaaatcaagttcacgttctttgcgagcagcttctgcttctcgctgacgcttttcttcagccttttcttgatcaagtagcttttgttgatttatttgttctttagctaatcgaactttttcttgaaccttctttaaattgtcttcaaataaatcattattcttgtcatagttatttctaactgcatgatcaaaatcattactaatggttgttctactatcatctaactcagaatttcgtttttgtacttcttcatcacgcgcaacacgttctactttagctttatcagcctttaattgctcatcaatttgttcattagcattacgagttttaagttcttcttgatcattaaaattttttagagctaaatttcgtttctcttctaattgtttcttatactcagctaatgcggcttcatcattagtctttagttctagtgccttgttttcttttaatttactcaagtcagattgattattttgcttttgatgagttgctttaactgccagttgttgaatctgtgccgctgttctgtcttcaacaattttatctagtgactctttagtaactctgttatatgcttcctttaatctatctacaattgcagcctttgatttcgctaaaccttcatcatatacacgttgaatatcttgcattgaataatctcttaacgcctgatcaattttatcattcaacgcttgatcatattgatctttaggattatctaaatagcctaaatcatgacgaatattatttagagcaaattgatttttatcatatcctcttggcaaacggtcaagaatatcattggcatcggtatatttgccatagctaattacttcactgcgactagtttctgtttcagttgtttgacctgcttgaattggtaaagcatcaacctcttcaggtaattgtgtaggaacattattcaaactaggattggttgcggcattactatttgattcttctgttggactgttatcctcagtctcatcatttacatcattttcaggaggtatttcatcacgcacttcatcatctgaatctagaatttgattattattaaacatgaacccattgtctttatttaagtcctcttcatcatcactcaaactaggttcaagttcattaaagatttgatcctttagtgttgttactgtttcttcttgatcacgagttaaattttcattctctaaatcacgatcaatcaagtttaaaatacccccgtcttgatcctcaggtaaaatttgtgcttcaaagctgctctcttcacgatcctcatcttcatcatcaaagatagtaaatgtaacattagaatcagctttttctaagctctttgcatagtccttaactgcatcatctgcagttttaatgtctaattcaggcgattttctacttaatttatgcttaaattgaaaatattttttcgccccttttggtaccttatcaaaggtaactaatagcataatcttctctccttctttaacgcccaccatcaacccagtaagttaaacttacttcaccttacttacaaaactaactatctagcattccaaccaaacatatttgcgaatgatggtactaaacttgcagctaaagcaacaatggcaacacctaccagtgcatacatcaataattgctttgcattttgcgacattctgttaccaaaagcgaaaagaataccagccaagataataacaacaatgaacagacctttggcgatactcttcaggttcttttcggtactaccagtagccttattaatattgctccaaacactaagtaaaactggatgttcgtttaaaaaagcctgagtaccaattaagccgctccaaaataagtaggtcaatttggtataaacagctaaaaacattgttaatcctccttgtataaaaaaagcatttagttagctaaactaaatacttttacttgtcccattaaaatcacttgtaggcttattatcatcttttgatgacgtaaccttatcatttaaagtcttatcaggttcagcaatctgtagtttttctaactgttctgataattcttttttacctgcgacttctaaaactgcatctttatatgcgcttttagtgcctgagatcaaatcttgcacaaactcaaccataattttttcttcccaagccttttgtgttaagccttgggaattatgtagcttgcgtaaaatggacttgtcttgtttgctaagaaccatttttcctccttaactattgcccaccatctcacccgaaagaaaaagaaggattagactttctcaccatttcatctaatcctttatacgttattcgtctttgtcattaggtaatgtttcagtttcacgtttattatctttatcagtgtttttgttcttgttcccatctcctgttgggtcaatatcatcactggtataatcgcctgaaacctcaatcttcttatctgcagaagcctttggcgtatttggcgttacgtgagtaatattacttggaatgtcttctttattgaacaagaaatgagattcgtttggaacttcaatcatattgttgtccttgttcaaataatccaaaagctttggtgtgttaattaaagtagtatcaataaacatctttaaatgtttaccatgccaatttgctggattattggcagtccatgacacttttcctgtcttattatcgatttcaagtttaccttgatcagtaatttcttttgcgtttcctgcagcattcttgtcgtcatagtcgtaaactttaacacccttgatattttgaacttctggttcaatagtatctttaattgctaatgaagtaatgtcctcattatcaggaacagtagcttcaacacggtaagtgtacttcttaccgaagtctacatctctaagtgacttagaatcgcctaatccatcttctgaaacaaacttttcatcctttggattagtaaatggaatattagtagttacttggttagaatctgcactaccattatcttgaattactttagcttcgttgtaaattacagcttgatctttatgttttggatctgcgtggtcctttaagctttcaccgcgctttacagttgcatcaaaggtaatcttgtaagtttcattatagaaatcctccattgctaaagcatcagatttagcaattactgataagttattacctgaagataaagttacagtgaacatataggtaacatcttgatttgcacggttataaactctaattgagcttgtatcaatattcagaatattatctaaattatcggtgattctatattctgtatatttcaaacgcttttcaacgtatggtacagagtgtgtaatttgatagtgatattgttcataacgattatcaagcatatcatgtgttactgacttaataccaccaacttcatctggagtattagttccctcatccttatctgagacatacttattaggattcattggcttatctcttacgataggtttatcgaacatatttagataagcatggttaaacgtaccattccagatactatttgaaatagaaaccttatccttatcagtcattccagcatcaggatcatatttaccttggttcaattgccaattatcagtatcctgttcaatttctgtttggttttcagctgcatgttttcctgttgtagtaccaaaaacccaatacatattaatatggtctgtgtttgacattgttgctgtatatgcagccttccaatctgaggatcttacagtacctgaaccatcaggtaaagcggtattgtgttgatttgcatctgaaaagatgtaattattccctaatgtgcttttatagcttaaccaagtatttccatcattttgtccatctccccaaataacctgatcaattttgccgtaggtagagctatcatatcctacccattgattaccgtcaatatcacgaacagtttggtttaggtttaattttaacggcttaccagtgtcatgatcaataaaatctatccgataggcaacagctccttgaccaggagtaaaaatttcaaaattatctactccaaaggcaattgttggattctttagtggtactttttcacgcttaccatcagaagtatcttgccatttatatgactgaatattccaatctgttgcggtgattttaacatcaatagttttcccactattagggtcaataccaacatttgagtaataaaccccaattttaccagctaatttttcatttcccataacggaaaatgcgtaccaagagtgatgagacccttcagtatttgtactagaagtagcccaatcttgtgaagcaccaccaaaggcatggattttggttacaccctgagtaattctaggaataaaagcatatgttcctgccattttggttccaacagcattttgtcctttaggcaaattgaccatttcggcgttatcagcatgtacagtatctgatccagtagctagatatgtgcccagcccaaagctcgttgccatcaatgcaattgcagcaaagctgactactttatttttctttgttagagaaatcatataatttcctttcttttgaataacaaaaaaagaagagccacttttttatactcttctttagacttaattattaaattagattatttagttagcattattccaagcactaatccattcaggacttgtaccatcaaccgtgaagaatgaaattcctactgcacttccatcggttgcttgtttatcgtagtaataatgtacacttaatgcaccataagctttatattctttccaaccataaatcattttggattggaaatcatctgactcttttaataccttaaagattgcatcggcagcttgttctggagttcgtccattatgtgtaatatctccacccattagtaaagctttatgattttcaccatatgcagttggatcaacatatccaatagcttgattcaaacccttagcagctaaattaggcaaaaaggttttaatatcattagtattctgactaattttaaaactaaacctgttataagccgcagtaccaggaacttgagcttgttgagctaagttagttagttctgcattagttttaaaagctggatagccctttgattcacggtacttttgaatgtcttgccataagcgcttttctagacgctgtaattcgttatcactaaagtaaacatgcttataaccatatttctttctgttagcatcttccttagccgtcattggtccatagaatgttgaccgccatctagtacttaataaactactattatcgcctacaatgtttgatttatttggatcaccaacatattcagaatcattagtatttactccagatgacttagacgaagcagtactggattttgtaaatccattattagtagtgctagatgaaacagtattataacttgcagttgaacttgtattagtagaagcaaactttattacgaaattagcagtacgaacatatttgttcttgccaatcttgtaatatttcttgcccttaatagttttcctaccaaggatttttacaagtttacctttcttcaatacttttttaccgacacgtttaccctttgcattataaatataagcattctttgtcaacttctttttataagttgctgcttgtacaacagttggggtattttcaacattgttattaactaatgccacagagctaacagataaaacagctgctgcacttaagctaaccaataatcttttcttcatttctagtatcctccaatatataatacgtggaaaatttattttttctacccatattatataccgtttttatgacaaaagcagcagctaattacttagtaattttagtaattaaccctttaatcttattcttaaattcatcattagtcttatacaaataagtaccaattccaccagccattgcaactaaacttgcaataatccagccagcatgttgcaagataaagtgacctgttcttggcaagaaaccatttttaccagtaattggattattacttgggttggctggattgtttggattatctgggttatttgtagagtttgtagttggattctttggattatctacattgcttggtgattccttatcttcttgtggtggaattacattaacagtatttgatttaacatcatcattgttaaccttcatatcagcagtgttaggaatttcaccattaactttagaatccttctttaacttagcagtaatattagcggtatatttcttaccacccatctttccaactaaagattgatttggtttccatgaaaacttctctgtattgtcatctaatttaagttcaccatcattagtaatatcattaccttgatcatcagtaattttgaccttttcaaggtctaatacatcctcaaggtcatctgtaaattcaacagacttaacatcttgcttattaccaactgtatagtcaactttataactaaagtcttcatcttgcttaaccttatcagattcaccccattgacctgattcagcctttacttgcttagttaccaaattgccgaatggatctggtttctttccattctcaggtgttggttcttctttcttaggatcaggggttgtcttttcaggatttttaggatcaccatttaaggtagtatgcaccacgtttgttggtgtatcttgcccattgatttgcatatgaccagtgtttggaattccgttattatcgtagcttgtaacatctgcgttaggcttgatattagctgcaattgctacataaataatcttgcgtgagaatttagctggatcattggcagaccaagtgaagctttcgtcttgatcagaagtggttaatttaccttggttagtgatgttatttccatcactatcaataatgactacgttctttaaatcaagaacattttccaagtcatcacttaatactaatgacttcattgcttgagagttaccaatatcaaatgttagtaggtagtcaagagcatcaccgcgacttgcttggttgctatcaacagttgaagcactaatgatttgctttaagtcctctttactagttggagctttagtggctacatctgaactagttgcttccttacctgcgttagggtttgagaacggcttttgtaagattttaacagcctctgcatactgttcatcagtaaccttatcattagccttgctccaaatgcctgtgttagggtcaacctttacgtactcttgcgctttctgataagtcttaggtaacgcagcatctgaatctgattgttgaccagatgaagtttcactcttattgccaaagaattttgcccaatctgaaggattcttaacaattcctttatgcgtcttaggttcctctacctttggggtcacaactggagtatttgatggtgtgtctttaccattcgccttaaagtgagccgtatttggaatttcgatggtattgtttttaatatacttttgtaaatctgcattgtctttgactttagcagtaacttcaactgtatatttcttgccaggcataatcttaaccaagtcagcatttggttgccagttaaagctttcattcttttcatcaagcttaagtgtaccttgttcagtggtaatatctttaccatcggcattcttaacaactaccttttcaaggtcaaggacatcttctaacttatcggtaaactcaacatcggttaaatgttgcccttcacctgcagtatagtcaatcttataagtatagtccttgccaacctcaacattgtctttatcttcatgataggaacctgatagtccctgaacactcttaactaccttattttcggctggaggtggagtttcaaccttaacaggatttgaaggaatatctttattgttgtacttcatatgagcaacattaggaatttcgtaattctttgttgctttattcaagtaaccacttaaatctgcatcggtcttcagcttgacagtaatatctgcagtgtagatatgctttggcatttgagttagatattctttagaaggttgccaagtaaaactttctttatctttatcaagttttaaatccccttctttagtaacttcatttcccttgtcatcggtgatcttaacgtcttcaagatcaagaaccttttccaaatcgtcatagaaaacaacattactaatgtctttaccattttcgggaattgaatattgaactcgataatggaattcatcaccagcgtcatgcttggctttttcaccatattgaccgttcttatcctctacttgcttaattgcagtaggttcttcatcattcggtgtatgaacataaacaggtggggtcttgatcttttcatcgttatagatcatttgaccaacattaggaatgttgtattgattcgtattcttatccaaatacctgtctaagttagcattcttttgtagcgtggtctcaattctcatgcttaactttttaccaacccaatcttgaggctttttagctgtcatattggtagtattcgtacctttatcaaaatcagctgtaaattgatcagtaacatcggtattaccatcaaaaacccgagttttattatgggtaaatacaggctctaatttgtcaaaaagcactaatttctttagatctacattgtatggaacttggtagtaaatatcaaaagcaatatctgatccctttttaaaagtagcatcacttacatatttcacatcagctgctgcatcagctttaacaatattagggtttgcattatgattagcgacagctacaccaacgccaacactacctagagtagttactacacctaatgcagagagtaattctctagtttgcttttttgatagctttttcaaggctattcctccttaatttaacaaaaaaacacctgcatttttgtcaatgtcacaaatcaaaacattgattcatatgtaggtgttttctaataatatataattattggcaattacttgtcttttgataattgcttgattttgatagaaaatggtttatttgtaccatcttctaaccatgcataatcaagttgtgcattttcactatcagcgagatcattagctttttctgtatcatagtgtaattcaatattattgtcatacaactctcttaagcaagcataaccaagaattgccaagaaataattcttatccttagtcttatcttcaaagacatctggatacaaacgactcattctttccattgcatcaatatattcactttccaacattacggtttgaaaagcataaggtctatctaccgctgtataaggagtatattctacatatggaaaacgtccatcatacttgctagccaatccttccgaatacttaaggaataaccagccagcccatagaatccgaactgaagccactcgattgtcttttctatctactagccatgcaggaaacctttctttaataattttatttgtatcagcaagcatagcttctggtaattcaaaatctacaaaaacttgttttgccataacattttcctttctaaaaatcaaaggagcctctaacatacttagaagctcccttataactttctgagccagtgtatttaccacgaataaaaagtctaccttgacctgtccagtcacaggtaaacaacgaaattactggcttcttcttaaactctttattattccaagctaatcttaaattataaactgaaataaagcgtgaagatgtaatcttgtaataataaactttcttataatctgttaataagattgttgttccattaggtagatttcctcttaccttcgcagtatataatgggctaaagaacgaacgcccatcatccatattatgacctgctaaagcgtaattgccttcacccatcctctgatattggttcattgttcctgcacctaagttcagttctacattaccaactccacgatagatatttaatagaacattatgatctcttattgctatttgtcctacagctcgataatctcttctatgctgatatgcattggcaagagattgaggtgatacaggttggacagccttcatattaaaacttggctttttcttctgtttgttttttctttgactcgacaaatgattagttgccacatagttagcagcttgtccttgaatatggtcaaaattagcaatgcagtaaatcgcaaccccaattaaaattaacgcaataatagctattactgtaccaatttttttctttttatcactttttcgctgttgattaatagctaatctacttttttttattttcattttaggaacaaaaaaaggcaattagcataactaattaacctttatttctaatttctacttagcagcttcccaagccttaatccattctggcgaataacttcccacaacggtaaagtttaattccaaaccgtgatcgatataatctccctcattattgaatctaacttttaaagcagcataagcatatttatctttatgtccttcaagtgttctcaagtctatgttgtcttcttctcttgtataagcattaaagatttcatctgcgactttcttgggatctctttcttttagattaatgaagtgctgtttcacattattatatctgaaggcatctaaatcattaagacttctcgcactatccattcctaacgcctttaatttaggtaaaaatttagctaaggtatcagtattttgaaatgtaccaataccatcacctaaagcgttatattcaggagtacctttttgcataattcgatttacaaagttattcaactctggatttgtcttgtaggcaggataacctttactttggcgataagcattgattttttgccataaataattttgaatttgggatacttggtcatcagtaaagtagatataacctttttctttgatccattcttgttttttagattgagaatttgagctattataattattagtctttttttctgctgttgcagaattgccagtagtattacctactgcagtatccgtagcattattgtttactgggttattagcaccttcagccgaagttgattgtgcattcgtagctttcacatattgaccattgcctaaggacaagtaatttttgccattaattgtcttaacaccaactacagtaaagacatggttcttctttaaagtatcagtgcccttgattcttttgccttcagcgttataaacataagcattgtgggttaaataatattgaccgctagccgtattagctttactggtcttcttagcaaaattagcaaccttaacgtattgattcttaccaatgcggtagtatttcttaccataaatcttctttgtaccgagaatcttaactgttttgcccttcttcaatactttcttgccataacgattgccattactcttataaatataggcattatgagtaagcttgccattttttactgctgcttgtacaacatttgtattattagcaacaccatttacttcattaacacctactgctccaactgataacaatgttgcaacagataaacttactaatacattctttttcataaacataatttgctcctctttccttcaaataattcagcttaaattactcgctaacttttccccgctctcacctgctttcattatactacatacgcaacattatagcagcgggatatccgttaatttttattattttaaaatatactcttgcgtacatcttccaaaacgatcatatgtaaaagataacttcacttgatcattctttcgggaaagtaatgcacgtaatgctaatgtttcttttcgccttattggcgtgaattctttaggatattcctttgctaattgattgcgataacggacatactcatccgccgttaatcttgtaacatctaattttttcattacattaaccaatcgatcaacgcaatcaaaattattcataatttttcatcctaatcccatttaaattgtgatctctttaattaccaacggttttgcgctatgaccgataacgatgatggttttctagttagccaccaaactgtaagcttttgtacagtacgtagcagatagcttcacctatctctagcctctcgcttcacgcattctgcaagctgtcctcttatcaatcctaatcaaagactctttcttgcccttcagttactacaacacttaaagagttaagtttatcgactcacttactattgttgatcacattccgacttcttatttactcttgagtttttcatcaaggtattcacatgtcaaaacagccaaaaagaatgtatgcttatcttttagtagcctattacagccattactattactttaaatttaaaatttcgttcaaactaagacttatcatcaagccaaaaataatagtaatctttgttgatggacggctattcccatcttgacgggtgtgattctttcttcttccacctttgtgtgccttcaattctctgtcttgcaaatcctattgagtcggctcaatagtcatgcacacgtcctacgcttgttgcaaagcatagttgacgcttattctgttttcaatgtactaatggactgtttaccagtcctaaaagaaatagctgagttgaacagctaaattattgatcaaaaatcaataattgtaccgactttcttaatgattaacattctaaggattttgcctcttttacttgatttgtcacgactactgccacaataattgctcctgtcacagctaacgcagttaaagcaaacttgctaaactttttcacgtttttcacgtttatcatctcctctgattttcgtttacccatttcttcaatgctgctttatcaatttttccttcttgatagcttctcaataatttcaaataattgcttctagcaacttctttttgtgtaattcgttgcagtagcttttcttgttgcttcttggctttcttaagccccctattaacggaaaaacttggtgggaagccctgatttcttgcgattgtttcattaacttctgttaactgttttcgcaaatcattaatttgactatcatacctaataaggagttctttaggattatcatccatatttttcttcaaatttttcatgtttgaatacgctcgccagacgtaataaacaatataaatacctactgcgactgttattaacttatacatatttttcctcactagattagagcggaaagattcgaactttcattgcaagtattaagtattgagtattaaagtattaaaaatagggatatatatgaatagcaactttttgattcaaaagaggagcaactcctttaaccaatattcattccaacttgcattttacctattaaattacgccctagttttacattaaatagctccagtaatatccgataaataaaatcatgatccatagaataattccaagaatcgatagcagaactgtcactaattcatccaatttttcaaaaaagttagcaaaccttgtgcctgctaaacttggcaaagatgatattgccataagaataattatgaataaattccccgctccaaatgcgatcactatgtatcgaaaatgttctaatataaatgaactgatcataatatcttacttgctaacatcaattagcggctttttcctatgatgagattcaggatattttcttttacacaataacctgcgatgtcctaatttaggatttacttcaaatccaaagcctaaataaatttgatcataaatctcacttactcgataaaaagttacttttttatatccagtattgtatttataagactttagagacaaaaaattttttggattttttataaataacccgtcaatattccagtaatggtacccatctatcgtcagaatttcataaacttctttttccactctgaatacgctaaagcgtctattttttactgatttttttgtcatccaatactcaccaatcacattatctccatcaaaatggtaaatcagcatctgttagttgtacttctttctgacttccaaaaggttcttctgccaatttatcttttttgtttgcttccacaatggtacggtcagcttctggctcttcatcatttgcttgatttgaattctgaggaatagcttttgtagactcttcattttgacttgttaaaacatcaaatgaattaacccagatatattcatatgcaaccttattaccatttttatcaataaagcttctagtcctttgttcaccagctagaataacttttaagcctttatgtactttagcaacgagattttcagccactttattccacgcaattacatggtgccattcaccaatatagtcttgttgaatcttgctataacggttttgacaaatagtaaaggctacatacttttttaaagattgggttgtctttaactccaattcttttccaatgtagccgtcaattacaacttgattaatcattttttgttcccctcttttaaaatgttttgctatttatattgtatatcgtttttacgatatttcaagcaaaaaacaaaaaatatacagatttgtagaagaagtaaagcaaaaaagacgctaacaaacttggacagtttgtagtgactttttagtaaattcatacttttcttcactagcttcatggataacatttaagagagcttcgcttttattttctcaaaatatttattttctatctggctaacataatttctcatatattcaaaatctaatattccattactcttaacaggtaatttgaattccgcattataaaaaatgctatcaacatttcttacagcttgtggatcaaatttcaatgccagtctttgcagccatggtagtagatagagtcccactttttcatctatttcaaatttcggttgaatgacttttataaattgcccactataccatgaatcattttgataatttacattcatttgcattaatcccaagctaaaagttttttctggattaagatgttctttatcaatgaatcctgtataacaatcaataccgttgttatttcgagttctcgttacatatggataattacaaggcatatctttatttaatgatattttatctaaatgtggagcggaataaatggaaaatagttttgcagaagaaaagcttttaaaattttgcatattacacctcttaatccaaaattttacctaatttaaacttcatataatttcttattgctttatcccagtcttcttcttcaggagttgtatttactttatagtggttttcaaaattccaatctgtacctgtattatctattacatcctcgacatattgtttctttaaatcccataactcattatgaaattttgaattattaacggctgcttgacctgattttaaaagcaataaaagatcgtgatacctattcgcaggactgctgattgtcttaatcccacgtttggtccttttataaccatcatttctaaagtctataaactttacgcccctatcaaaatcatgtgggaccccaacttcaaatatgtaaattgacgtacttacaatagcattaggcacaaacaaatcagaaggcatctttatagaagctaacagtgtgttgttctttaaaatttcctgattagtagttctagacttgccgcttcccgcactatcttgaattataatcgctgctttagcacgctctttattagacataaactttaatccgtatgctaaaaatggcataccataattgtccgcactaaatggaggattcaataatagcttatttgcattgaattctgtatataatttagttggttctttaaaagtatcacctttctttatttgactagacccatcaccacgcaaaatcatgtttgacgcagctagcgtatacatttttgcatcatactcaacgcctaacagttgagactttttgatttgctgaattttcctattcgctttttcagaattagacccatatgtgttattggcatcatcgatcattaatttcatgctagaaactagaaaagctcctgatcctgtcgctaaatccatcaccctatcattcatacctacatctattgcctttgccatcagattagttatgtatggtggtgttaatactttacctaagctacctccatcacctaaagcgtactttaaaaattctgaatacattgatcccataatatctagagaaccactgtccgcatcaatctgtaagaaaatttctttatacagaaaggtaaatacttgcttagttatgcttgccttttcagtctgaatcatctttccaacaattttatctttatcaattagcttatctctatctaaatcggaatgaatcgctccttcgaaagaatccatcattaacttttgtttatcttgagtaatatttcctcgtttatttaagaaatcacttaactgatcgattattttaatagaatcgctttgtttttcgctttggattccttgtaaatcacacggtgttagtcctcccgcaatgtattgacctgttttagcatctgtaaccttttgcattgccaaaagcatacctgaaacatatacaacacgctgttcagttgatatattcaaattattcattagtttattcaataattttgcttttttttgcaatttttgctgtgatttgactaatacctgatgcttttcagtttcagttaatagagcattatttaggaaatcttgaaatgcttccttggtggacaaaaaatgtaaattatcgtattcatacatacgttttggtttgccattgacagcataaacataataaacctgttgcactacatgatcaggattatcaccagcaacacccactatgatacatgacttatacatctttgatttaagaattgttctcgcataatgtaacgcaccattgacagcatacttttttatagctgattgagtcgtagaaatcctacctttagcatctaacttgattagatacttagaataaagcttattttcaaagagaacaggaacatcgtattttgttatattaaaatctggctcaccaaagttagttttatttagtgttttagctccaccttttagtgcttctttcagatactcgtccatatatgattcaataccatagtcttttttggttaagccaatctcttcttccaactcatgctcaatatagtcatccacttgtctttctagcttgtaacctaatgtatctgacatttatgccgcctccctttcgaggttaatggcagcacaaaagagcgtatttaaaatatatacgctctttactaatcctattaatagttcagataatcctaagatataaattttacagttgagatagctgggggctgtacccccccccattctggaagttattctggatattgttattttttgttagcatttatcttctagtcctcttattttttaagctgtagttagtggcttaaatgttattactgcatgcaatcctaatcctttagcatatctattaagagtttctaagctaggaattgaagttaagttttcaatcttagcaagttgtggttgtttcataccgattcgtttagctaattcaacttgagaaattccttgcttgatacgctgagcatgcaggtaagctaaactatcaatagctgtcatttcttcaggactgatcgatgttaattccttttttaattcgttccaagtagtcattcttattcgttcctttctaaccaatcatctaatctgtcgagggcttttgctatttctcgtggatctgttttattgttttttttagtgtaatgactcaatataacatatctgtctttcttccaaccagcatagaaaaagcgctctggtaatggtcgaagctctagtaaaggatgacgataccctttcagaaatctagactgaggcattcccatatggttacctaactgttctaacatgctaacttgataagaaaattttgttaaaacctgtttatcttgtttttgattgcttcggtctaattgacgaatatactccttcacatctgatcttccatactcgtcctcataaaaatctacctgatacatttcaccctcatataactaatttgatatatattgattatatagcaatcaggctatgctatcaagaaaaagtatttgaaaaaattaacgtagtgaaaacagttattacttttccctcgaatcttgtgtaagccttctaaacatcttaggattaggtaaactgataaatatcttgctgtacctattaaagacgtacggacacctaacttcatagccttcatatctattagcattgctgatttttgtaacaaaattagtagtagagaatacttgtcttttacccattattaaattagatattgcacttctcccctctagtttgtcatataagtaaattgaatcgctatgtttatactgaataatcccaatgtaatttgtagtcatgtagtctaagttagctttttgcgctaatttatgtgctttaacaacactaattattctttcattcgtttcattttccgcttaatccaagcaccccccatagataaccccttaattcctagaaaaatcacaccaattatcagtgcaattctccataagccatccatcagtgttaaaagagctggaaaaaccaggtaaattccgaaagctagccaaaccaatttccagagatggaatgctgaagcaagaataaagacccaaaccataatccaaaaccaatctgtttgtgaaagtactaaaaacatagcgttctccttagcattaataaactcttattacctttgtctgaacttgaggaatattacctctagtattgataactacttgcaaatcggcttcaatttgccttgcttgcttagccttaaaaacttttatttgatttttaggtacgattgccttaatcactatagggggatcgtcctcaaaagaatgatgatcatttgataataattctagcatcgaacatccttgattcatatcaacattcattactttaagcgagacagacttataattcacagtttgtttgtctcttttggtaactctattaacatacttttcttctgcgtctgtcttgttaaagactactgctatccaaatcaaactcgtaagaaagtaagccaaatatatgcttaaaaataatttcatagctagctcttttcaactactacgagccattttccttcaccaacatacttaatcttttgattagccttaatgctgataaaatgaccattaagctgcttaacgcgaacataaaagctattactatccaacggttgaattccaagcacctcacttctaaagcgccaagtaaaaactttagctaattctgcaggtgtagctagcattccaggatataaatcatatttattcatcatgaacccccgacatattcatataatctacaaaagctttctcaatcaatttacccatttttgctagatagtctgggttataaattctattgtttaatacttctggactgtttcccattaagcccaatgcttcccctgctaaatagctgtttaactctagcttccgcttactactaagtcgttgcccatctagttcaagatcatctgccatgctaagaaacgcaatggaaaacagtctatcttcaatttcttgaatatcaacttttccatcaagcaagtcttgtgcaacttttttatttttaggattcattcttacaacctcatatccgtctaattatctatttatcaatatcttacgatcttatacaaaagtatcgcaaaaatgatatattaataatgatttactacatagaatttaaatttttaaaggggcatattatgaaagataaacttaagcaatccatcatcgcaattactagtgccaatctcaaaagaattttgtacaatcaaaaactaactcaaagagacttagcagcactaacaggaatctcgatcccatcaattaatcgctattatttaggaaatggcgccataccacaaaataacttggtaaagatcgctaaagccttgcatgtttcacctaatgaacttgatccttcatatcagcccactaaagactttttatctcaactagctgaaaaaactgatgacccagatttaaaatttagaactgattatcttaaacagttaattcagaccagcaatttatctgttcaggaaattgccagtaggctcaatataaagcctattacagtctataagtggctggcaggggtaaatacccctagcaaggaaaatacagccaaattagccgatttatttagcgtcagcgttaattccttagcagatgcctctaaagaaattcgattaactcctcaacagagcaaaatattaaacgctctgccatcagatttaaccaatcagcaaacagatctaatcatttctctgatcaaatccgttttagaaaatgctaactagttttcgatagattcatacatgcttgaaattccactaattagtgctagctggcagttaattctccattgccaccagttaagtatgtattcgacttgatcatttgaatctagcatggttactgagctagttgatacttgcaaatctgaatcttctaggattgttttaatttgaattgcaagattatctgacgttgttttggtttcttgcttaactttaaggtgattatcgcttaaaatgtcgcttaataaacgtgaggactctttcaaattcagcatccaattagaaggcaacaagtcgtcaatagcgtaacctaactcatctactttgaatataaacttttcaaaattttcttttttacctgttaattccatttatttctcccaactgattaaatctatagctctttgtggagcgttatttgtttacatgtttttgcattttatcttagctggtaatttttgcattccagtcaatctcgtgttgatgtttttgcatccactcacaagcttctttagcaaaaataattgttgttttgccttcagaagtctttctaggatttactacaaaaccaccatttttgtaattaacttctggaaactcatcgaagataaaagttctcacccagttatcacccttacctcgacaacaagtctccctaaattgcttaatattccaagttttgccagttaaatcttttttatcctcttcgacagcttctttgacaatactttttacaaagtttgtaagacttggaatgttgattaaagctttagtcatgtcttcttgcatctttatccccagctttcataattttggtcatttgccaatccatctcttaatagctttaacaaatatgcaaatggcttgccgaccatatcccactccattcgctctttgaatttatcttttgtaacttgcaaagtactaacatcacattcatatagcaactttctcatttgcttaatttcatcaagagatggtctagttgtttgatttttgcgtttatcgtttattcttgcaataaagaaaaattctttgtagattttttctctttctggatcttcttctttcttcctagaagaagaattattaactgttctattagttgttctattatctctgttctttttatgtgaagtgggcttcactaggggtgtgaagtctgcttcactaccctcatgaagtgtacttccccaccctagtgaaatgtatttcactagggttgcgccagcgtgtatttttctaccaatgattgcattattttcatcgctcactattttttcacgtatgatcagctttttcttttccaaaatatcgaggtaatcattgacagtacgagtagatacttgtaatcgttcactaatctttttattactcataaaaaactcgccagtcacattgagcattgaaattatttcgcccattaacaagatagttttaggctttttcaataattccttatctcttgctatacctactggaatatttaaaaaagcttttgatccttcaaacactttctccactttatacccctcttagtttatccgatttgaataactttattttaaaaaaatatctggatcaatatctaaaacctttgacactgttagcgcaaaatctgcgttaaactttaaacgaccatttagtcgactgctaaaattagcgctactgattcccacttttttagcaacatagttttgcttaattccatgctctctaagataatcctttaaaatcttcccagcattttctttagttgttctaaccaaattatcaccttcttattattcaatttgaatatttttcttaacaagaattataatacgccgttttggataaatgtcaataaatatttatcctttttgaatataattattttcaaattgaatatttaattttagaattgagtcaaataggataattttttttgcctttaggaggatttttatgagtatttttagcgatagacttaccaatgcaagaaaagctatgggatggtccagaaaaagagcggtttctgaaatcggtattccatatccaacatattctaattatgaacaaggaaaaagagagcctgatatttcaacaatagctatctttgcagaaaaacttaacacaagtgctgattatctgctagggcgaactaataacccttctccttcctccactaacagcgaaatcacagactccgatttaaataaaatgattgataatgctaaattttttgatggtaagccaatagacgaccatgacaaggagctagtcaggggcattttaaagagaatttataatgaaaaatagaaaaaggtgtgcattatggacactgaacttaaaaggctacttaaagaatcaaacataaaattggagtttgctcctctacattgcccaggcttactcgtacctggagaaaataataagcctaacgtaatgatagttaattcaagctatgacgacgagaaagctaaaaacgtaatcctacatgaactgggacatatgatatacgacaaagatgttcaaggcgactacaaaacagatgattgtgctcgtagttgcagtgaacacggagcaaattcttttttaatacatgaaagagtcaaacaatatttcgctttgggtaacgattttcaaactactaattggttagactttgctaaaagcatcggcacacaagactactttcaagtgcaagaagaactaaataaatataaatttaaagagtgaacatatgcttttaactatttcaaattatttaaaacgcccacctgctcaaacaagtaggtgggtgaatttatattaaaacacgtataagtaatttatacgtaactgaaacttgaaagctaagattaacgctccttccccgcgcctcttggctttttcttatcaaaaataaaaacgcaggctctctctgcgttatactttaagtgtcgacctaaaaagtaaaggagatcctgcgcaatgaacagtatagaacaaatcgacacagaaaatgatactaaatccttaatttcttcatttattaatctaattggtctagctaagttaactaaacaagtcaattttaagcgtaaatccaccgtttcattaaccatgattatctcttggctgatgtcagtacattttgctcggctttctttattcagagctaaggatgacaaacgtttttccgttagaactgctcgcaatgtacttaacgatggaagaatcaactggcaaaaactattatgcttgattgcagcccggctcattggctgcttaaaaccatttatcgataaaagacgccgacttgcttttatcgttgacgatacgctgatggctcggtctttttctaaaaagaccgaattgctagctaaagtctatgaccatgacaagcatgagtatttgaacggatatcgtggtttaactttaggctggagcgatggcaataccttcttgccggttaactttgccttgatgtcaaccaaaaccaagaaaaatatgattggagctgctcccattactgctgatgaacgttcaatttctggtaaaaggagaaatcaagctcagagaaagatgaatgatgtaactgtagagttgattagacaagccttacgattaggagtagaagctaaatacgtcttattcgattcttggttttcttctccaagaatgttttggattttaaagaagatcggtttagatggacttggcatgatcaagaagagttcaaagatttattacatttatcgccatcgccgctatagcgttaaagacttgtatgatcgtttggctgcttcaaacatccgtaaaaagaaacattatctttattcaagcatagttgaggctcaatatcatggacatagctttttattaaagctcgtctttgtctccaaccgtggaaacaagaacaagcatttggttttagctactactcagacaaagcttagccctgaagaaatcatccaactttatggtcgtagatggcaaattgaaacatattttaagacgtctaagcaatatcttgctttagataaatctcaagttcaaagctatgatggccaatgtggctatatcgcagttacagcaataacttatgatctattgacctggcaggaaagacaaaatacagatgataagacaatcggagatttattctatctaatgaacgaatccttacctgatattagattcgtagatgcattggtctacttaatttcagaattaaaagagcttaaacagaatagttttgaaaagatagatgaagtaatcaatgactttattaaccaactgccacgattcatacaaattgcactgaaacagatcatataaaaactaattacgtctaagaaagctcaatagtgacaggacttgagcttgattttggtgctttcaattttcagtacgtaacatttaaatagcatataagtaatgtaagtgtatgaggtaatgaatatggcacattttgaaaaaagaggcactaaatggcgggcacaagtatcttggtatgatgagcaaggtaagcgttgttttaaagtaaaacaggggtttttaaccaaatctgcagccagaaaatgggctaatgaaatggaagttgcaaaagatgataatcaaatatctaatcaagaccccatttttgctgaatatttcaagaattggtatgaaacttataaaacgcctggtacaaccaacggcacaaaaaaaagatacaagcgaatttacaaactcttaactgaatattttggtaaaaccaagctttcaaaggttaccaggtatcggtaccaagaatttatgaatcagtatggaaaaagccatgttaaaggtacagtctacaaaacaaatggaagtatcaacagtagcattagagacgccttagctgaaggcttaataagaactaattttgcagaaaggatcaacttgacgtggaatgatgaacgtactagaaaaatcgattatctcaatttcaatcaggtacagcaacttaaaaagtcactcttaggcggaattaaaccatcatatattagtagatacatgctcttaactatcatctacactggtatgcgtcctggtgaaatcagagttctaacgtggcacgacttaaactttgaagatcacactattcatatttctaaatcatgggattacgataataataaaatatttgactatgattctgatgaaattaataaagaaaccaaaaatcgctcttctactcgtgttattaaagtagatcagcatttactagatattctcactcagttaagaccaaacaatcatgaacgacttttcattgaccctgatggaaaaattccaacttcaagtgctgtaaacaaggttttgcgaaaacagttaaaaaagcttaatatcaataaaaagaactttcattttcacagtctaaggcacactcacgtagctatgttgctattcaaaggtgttaacttatattcaataagtaaacgcctagggcactccaatatgagtatcacggctaatacttatgcttacatgttagatgaattaaaacaaaaatccgataaacaaatagtaaatattctggacgagatttaaaataatttcgtccttttttcatgatcagataccttttggatacctttgcaaaacaaaaaccgctctagaacaacatctagaacggttatctatggagatgaggggaattgaacccctgtccaaacgcatctcgtcactgacctctacgatcatagttatattacttgaacttcactagctcaaaacgccatataacagggctagaatgggctagctaacctgttaagactctttttaactattcaggtgaggtagttaaacgtaactcgctaaagttgatactcggtgtcagccacgagtaaaccgacaaggagcaacacatgcgcttaaattaagcagctaatgcgtaagaatttttgttatttgcagttatatttaactgtaacgtttttacgtagtcgtaacctacgaaccgcagtcaatgcgggtctacgcctgtcgaatcccaaaacatccccttgagatacttattcattatagcatagacacacattacatgcgataaaaatgcttaatcaatattagtcaaacgtaccacatcacgttcaatcatcaattcttcattagttgggataaccattcctgcaactttggaatctgtttttgtgattagtccttcactaacactttcattagcttcattatctacaacaacacccatatatgcgaaagcgtcaagaaccgcttttctcacaccagtatcatgttcaccaataccagcagtaaagataattgcatcaacgccgcccatttcggcaatataagcaccaacgtagcgaataatacgattaatgaaaatttttcttgctaacttagcccgttcgctatcactttcacgcacatcgcgcatatctggtgaaattcctgacaagcccaacaaaccagacttattattcatgatataaatcatttcatccatcgacttatgctctaccttcattagatgttgcacgagtgaaggatcgatatcaccggttctagtagccattgtaattccggcaattggactaaagcccattgaggtatcgtaagacttgccatccttaactgcagtaattgatgcgcctgatcccaagtgacagatgactaactttaagtcttttaaatctttacctagtaatttagcagcacgcggtgctgtatagcgaattgaagtaccatgagcaccatatttacgtacaccatatttttcataatattcataaggaagtgaatacaaataatgtactggatcaagattacggtgataagtagtatcaaaaaccgcaacttctggcacatttggtaaaacattcataaaagcttcaattccgcgagcctcagcaggattgtgaagcggagcataatctgacaattcgtagatcttaggcagattttccttagtaataatagtagaatccttaaagtactctccaccattaacaacacgatgtcctacaccgacaatttcagttagttcttcaacaacatggtatccttttaaaaacttgatcaataagctaactgcagcttcttgatctgggatttcagttttttcaacgtgcttagtaccatcagctaacttaatctcaaatgatgaatcttcaagacctacacgatcagccattcctttggcaagaaccttttcatctggtaatgagaataatttgtacttaaaagatgaactaccagagttaattgccaaaacttttttcataaaaattaattcctcttctttcaaaaaaataagtgctttatcaattaatgattaatctttgcataccactcgttaagtttaacattaaattgaattaaagtctcttcttttttcaaggaaccaagtttggtaagcaaaacttcacttgctttggcctcatcaccgtgattttggaaaactaaaactgactttggattaaacttgttcttaaacatatcatctggcaactctacaatcgccttcaaatagactttcttagttaaccatggcataaaatcagcgccaatcttgcctgacaaaatagacttaggaactaccaaaaaggcatagccgttaggctttaaattattaataatttgttcgattaacaacaaatgagcaaaagaatgacctttcttagcctgattttcaaaattcttggcattctcatcaactggataatagcctacaggtaaatcacttacaattgcatcagcgttaggacacatccaaggcattaaagcgtcttgatgatataactcaatgtcaatattattcagatgcgcagccacatctgtcaaacttaacatatcttcatcgttatcaatccctaccaattgataattatccttagaatgattgagtgccttaagttgagaaataattgaaaacaacaaattccctgtacccacggcaggatcaacgatttccatcttttgatcttttaataatttatgcatcaacattgctactactgtagcaattgcaggtggagtaggcatttggttaacatcaaagccatcatcattaactgcctttaaagttagaaaagtaaagacttgagccttttctttttggctaatttcgtcataatctattgcttgatacttttgacttaattcagccactgttttttcatccggtgcaccattttcaaccttaatcttgccactttctaagttatcaaaagtctctactaaggcttctgtaaatgaaacatttaatgccgtttgcaaagtttgcacacagtctaaaaactgattaaaaagtttttccaaattttccatagcggtccctccataccttaattattttatagaaagggataaagaggtgcaaggaaagtcaatcatccgttaagcattcgataattaggcgattgttctccatgctagcatgataaatatcttgatacattttgataaacaaaagcgtggtcattaaaactaatacactacttagtaaggcactgccttttacgttatgcgtctttttctttggttttagcatttttcttttcctgttcctcatcaagctgaaaaactaaatctgatgcacccttatttttctctgttaccctaataatgatgctatctttagtggttttaaaagcagccttttcaacgttaaataataacggcatatagcctttccctgcaccagatactttaagtacgttctttttatagtattcaattcggtaagtagttgcatcgcctttttgatcgatgcacttaaaggaagcactattacttatagctaatttagttactggatacactgccttaattttgtcagcccgcataaaattttctagctgtacataagcataggctacttcattgacatgctgattttgattcaagtttgcttttttaacactcaacaataaattttgtaaaattagcagcaccatcatagtaataaaaagcgaaaacattgcttcagctaacataaaacctttactctttgaccgcaaaagtttgtttagtcgttgcatcccaaacatgattacgtcctgccttttgataaattcgatcgtgaactgttacttgctccaggtcagttttagtcagtatatggtaagcataagcacgatctgtttttaattccatctcacgaccatttttctgattttcagctacagttatataaaagcaactaacagcaatcacagcaattataattgctataaagctctcaattactagaaatcctttaacttttatcattccgctactctcccccacagcatttgatatttcaggcttttttccattccgtagccactaaaagtcaccgtacctggtttagaataaccagtcaggttgaatttaaaatgatccaagccagtaattttgatattttgatcaactggaatacttttgtgatattttccgccagagaataaaatttgattggatttagctagatatgatacgcaaatagtaacctccttgatcgtactgtacctcgaagtttgatcaagtgccgtcgtaactcttttaacagtattatcaaaaatcagtttttcttgatatctttttaactgcaaactaccaatcaacaaaatgccacagcaaacaccaagtgtaattattacttctagtagggaaaagccggctaatttatttcttttcaacgacttcgccactatctaacgtgaaattctttttagctttagtaatttgatcaccagttaagtaatcgtccttttttagatcttcaaaatctttaggttcaccatatttatccttatataactcaacttgcgtttgcacagtagtcctaaatgcatccgcagttttagtttcagcattcttcttttgattaatcaaattaggcacaattagcaaaatcaaaatcacgataatggcaattaccacaaccatttcaatcaaagtaaaaccctcttgcttgcggcgcttagccataatgtttgctaaatacttcttcatcttctctttcatttttaacttaatcctcttcttcactctatttttttacttttatctttaatgtcactttttctatagtccttgcatcattgaatacattggtaataacagcttcaaatacattccaataatgcataagccaattaaaataaaacaagctggttgaacattgacgactaatttctcaattttttcagttaaatccaaaaataggctacgtcctaataacaaacagcgcttactcaagctctttcgctcagagccagtctgcaataaaactaataaactattaggcaaaaaatcctctgcattaataatttcttctaaattttttccttcagctaaatcgtgccctatcttttgtcccagtgcttgctgcaatgaacctttctcttgatctgccgcatattcgcacattcgctgcaatgaaaagccactagctagcagcagtccaatgtcataaaccaacaaataatgaatatacagcataactacctgcccaattaacggatatttactcagttttttcattgatgaataatcctgtttattgagcaaagtaacgatcttagcaaaaaaatataagcccagcaatacaataatgatcagaccaatcatgaccatatctcctgaatgatcactgctatcgctgaattgtgtcgaaataaacgattgcataaagaccagtaaaatcaccatcattatcgctaaaaccaacggataagataattcagcccgcagttttttcatctgctcctgttttagtcgattcaacgttgctaaatgctgcaaacattcaactaggtttccttgctgtaaagccaaattaacctgagttactgtcgttttagaaaagcctagtttaagcagttcagtactaaaacttgctccttctttcatgcgactagccattctttccatcaactgacacctttttggccacaatgccggcattaattcaattgaattgagcaaagaaaaaccattatctaaactatgttttaaataatccaaaaaggccaattgttcttcgccatttaacttatcctttttggaattgccaatatacttcatgattaatttctcctcctttccacaaacgctctagattttcctgccaattaacgaattcaccacgaaccgatttgcctagctctttttttagcaaagaatctgctgcaatatccatcaagcactttaattttccttgactgactaataatcgctgatacgacactgcagttagacaatttgtcagttcgtcacacctaatacctaatccctctagtcgagaaatagtttgcaaagtacttttagcatgaactgtcgcaaaaaccaggtgtccacttaaagctgcatcaactgctaaacgtgctgttccttgatcacgaatttctccaataattaaaatatctggacgatgccgtaatgccgcctttaacaggttttggtaatcaattcccgcttcgttattgacttgtgcttgcaaaaaagaagactcatgaatttcaacaggatcctcgattgtcatcactactttgttttggctcattttcttagcaatttcatacattgtcgttgtcttgcccgagccagttggaccactagtaataatcaatccgcgactcttagccagcttttcaattgttcccagctgctctggaataaaatattgactatggtcaatcccatagatgactcgaataaccagtgactcttgatcggaaaaatctcctaagctagataaacgcaagaaatattcatgtccttcattctcatatgtcattgcgccaacctgcgggcgacgatgttctgcaatatccatctgagcactgtacttaaaaaaattgataatttcctttcccgtctccaaagtaaaacctgcatattcaattagacccttaccggtccgaaatttaaccatcaagttttcttttttcgggaaaaagaaaatatcacttgctttaactttaattgcctcaatcaataattcactgacaatttctttgatcttcataaaaatcctccttttttgcctcacattatttattacgcaaaaaaaatcgatttttttgtgagaaatttaaaaaaacacaaaaaattttctcaactctaaaaaacgttgatctaacagcatttcaagattaaaaaaccattaaaaaagtacacaaaaaaaatagcttagccattggctaagctatttcatcattaactaattaatcttcatcagccgctgcagtataaacattttgaacatcgtcactatcttcaagagcatcaactaaatgttcaaattgttccttcttatctgctggaactggagtggtgttttgtggaatcatagttaattcagcatctgctagtttgtaaccatccttaattaaggcgtcacgtacacctgcaaattgctttggatcagtgtagatttcgtatgcatcatcactagtttgaagatcgtcaccaccagcatccataacatcaagtaatacttgatcttcatcagcatcagtagttgaacgatcaattacaatgtagcctttacggtcaaacatgtaagcaactgaaccagtagcaccaagtgaaccaccgttacgagtgaaagcaacacgaacgtccgaagctgtacggttcttgttatcagtcaaagcttcaacaaagactgcaacaccacctggagcataaccttcgtaagtaatttcgtcgtagtgttcttctgaaccaccttcggccttcttgatggcacgcttgatgttatccttaggcatgttgtttgaacgtgccttatcaattaccatacgtaatgtaggattcccatcaggatcaggaccaccactctttgcagccatataaatttcacgagataacttttggaaaattttacctctctttgcgtcttgcgcattcttgcggccttgaatattgtgccattttgaatgtcctgacataaggatccttctttcttttttctaatattaattaacgatattatcttaactcacagcacctcaaaattcaatggtgtcaaccatttaaacttgttttttctggtcaaaaaatctgtgtttaataaacaatactagcattatcagcaaaattgccgttaatgctcctgctccatcaagcattacatcatgcacgctcggtgttctatcacctgttaaaaattgatgatattcatcaaatacagcaaatgcaattgccataaaccaagttaaaactggtgctacccatttgattttgaaaattcttcttaatcctaaatagccaaaaccacctagtaaaaaataagaaccaaagtgagccattttacgtaaaacaaattgggccagccctgctcgaccatcaacttgcacattgtgaatacgaccaccgtaagtaaaatcccagccagcaacgatattctctaaccagccaaaataacggttaattttattgtcatgaatttcctgctgttgataagtcattgaactagaaatgaacaatgcaactagcaccaataaagcaagcagtaaaaagattttttctcgtttagtaaaatgaaatttatccattgctatttcttctctcttttttacttcttactttaacaaaaaacgggttaaacttgacccgttttataaattatttaactttgcttaatgcttcatcaattggtgtgtccccatcatgcataataattacttgatgaatcgtattatcatactttaggctatcaaccaatacctgagcaacatcatcaatcgaattttctccaccttctggagtaaatgatgtcttacccgttgctggcttctccattaagttacctggttgaatgatcgtataatccaaattagtattatgaattaaccattcatcagaaaagtacttagcaatatcataatcaataatgcttgcaagagaaggaatttctgcccacttgtcttggtcaagcgcaaaggcggagcttagttgaacgtaacgcttaacgccattagcttcagcagccttcatcagcttaactgcgccatttaagtcagtttgcaataagtcctttccacgagaacctgctacaaaaatcactgcatctgggtgacctaattcttcggtcagcttattaagcgaatcatgaaaatccaaatgttgcacccgcatattaggagaaataatttcaacagtattttctcttcttgcacctgcaattacttcatagccttcatctatcaatcttttgattacttctttgctcactctgcctgtagcaccagctacaaaaactttcattgtttttcctttctaccagctagccttcttaacacctggaagttgacccttatgagctaattcacgcatacattctcggcataagccaaacttccgataaactgaatgcggtcggccgcaacgttcacagcgcgtgtattgtctagttgaaaattttgtttcttttttgttacgaataatttgtgatgtttttgccataaatacctcttatctgcgtctatttattctttgaggcgctggctttcttttgctagttaatagtcccaacgccaaaataataattccaattgccaatacttgtccagtcattaacatccccacctttctttttgactcttactttttgttggtgtattatacatgcttacctataataagtaaagagatttgattgtaaatagaaagcgttttacactagtctgatacattccctgtcaagtagacagtagaattacataaagcttttattcctcagttgattaataatcagctgaggattttttggcttctcttattttcttttcgtgtattttttgccagtatttctcaattcgatgatttggtgcaatagggcaattcttaatattgcctttcatcgcttctttgcgcatttcaccagcagttaaaccgttaaaacgtttctgtggatcttcattaatgtagtaatctattgtcttacaaatagaatcattaagttcatcataactggccacttgaggatgaagaataactcgcatttctttgataatgccttgccagccttccattggaccattatcaatacagcagccaacacgagacattgattgcgtcatgccttggtcttctaattggttttggaaaggtgcgcgagtaaattgaaaaccacgatcactatggaaaagcggatgagcattagggtatgctttaacagcctgcttataggctgcttgaactaaagcagtatcgtttcgtttactaattgcgtagccaacaggatagcgatcatatagatcaaacacagtacatagatatgccttaggcaggttagcagcaacgacttcagtgatatctgtacaccatttttcattaggtctagatgcattaaagtctctttttaacttgttttcggccgttttctcaggcgttgtatgcttgaactttagcttctggtatctaggcttttgtgatctaatgccattgatacacatcaagcggtaaacagttttatgataaaccggcttttcatcagacatctgtcgattaactgccatggtcatcttttccgtcccaaacagactgttgttagacttagttatttcaatgatctttgcttcaatctttttgtctcgttcttcacgcttactcggcttgcgcttaggatcaaagtatttgtaataagctgagcgtgctattttagcccatttgcacattaaatcaatcttccaattgtacttttgatggcagtcatggattaactgatatgtttcttgtttccagcgtctttttattgcggcttgtctgtatcttggttgtccggcaagcacatcctttctaactgatctaatttttttaggaattcgttcttagtttgttcttctttgagctgacgctctaattccttaatttttcgattagccagttctaactcagttagctcttctggcttcttatgtctgcctcgtttatctgttaatcctgtttcaccattagctagatatttgtgtgtccagctgtaaacctgctggtaagaacaatcaaatttgacagctgtttgagtgtaattcttgtcgtgattaagacagtattgaacaatctgaattctttcttgctgggtagtttttcttcttgctttagtcatatagacctccggatggggatcatagtcccgattttctatatgactattatacttggaaacccattctgatactgttccattgcttctaatgccatatttattagctaaagaaggtaacgacattttgccagctaaatattcttgaacaaccttttctttaaatgccttagagtaatgattattgtattgagcattacttagaagggtatcacgattgctttgatattgatgaacccatcttcttacttgcatcgctccacttttacttggcatcttaagccgtttagctatttcaacgctgctcctattaccattcaagtattgttcaactgcccatatcttttgatcgaatgaatatttactttttctggacataaaaaatcccacctccatggataattgaatactttatgtatttaaatcgtccactttagtgggattgtatcagtcacagttctttttaataggtaaaatttatttgaatactttcatctaagaaaggaatagaatgaacgaaaaatgtaaaaataagtcgccaggattcttatctttttagggagtaattatttttaaatagagaaggatgagaattaattggacgatttaacatcaacaaataaaatgaaagccatcacttggcctgttttgaccttgatggcactttgtactgttatcggcttggacgatatcatgtacaacttccaaaaccaagggatgccagttatcacctcttggattatcatgtgtttgctttatgtaacaccttactcattaatggtaggacaattaggttctacgtttagtgaagaaggtggcggactttcatcatgggtccgcggtactgacggagaatttttaggttacttcactgcttggacatactgggcagcctcaattccttatgctgtagactccgctaacgaaatcattgtcgacctaggttgggcattgaccggttcaaagggattccaagataaaattcctactaccatgtttgctgctttgactttcgttgtgttcattgttttcattatcgttgaacaccactttgccaactcaatggaattcctttccagtattggtggtggtttgatggtcattatgactgtcttgtttgttttccttgcctttgttggtttggcaaaatcaggcggtcacatggctacccaaccatttacttggcacacaatcattcctaaattcgacttgcactactggtcaaccgtcggaatgttaatctatgccatgaatgggtgtgaactggttgcaccatatgtaactaagatgaagaaacctaagtcagacttccctaaggcaatgattactttagctatcatgactgctttcttaactatccttggttcatttgcacttggtatctactttgacgcataccacattccaaacgacttgaagatgaacggtgcttactacgtattcgacatggttggtaaacaattcggtatgggtaaattcttgctttacctctgggcttggacatcattattgttcaactgtgccttggttgccgtattgcttgatgccatgactagaatgcttatctccgacactggcgataagtacatgcctaagttcttacgtaagaaggacaaaaacggcttaccaattaacggttacatcttaactgttgccctttcatcattcatcatgatcttaggtatcttcttacctgacatgaacgatatcttcaactggttgcttaacttgaactcaatcatttcaccaggtgttacctgctggatcttctactcattcatgagagtaagaaagaactcaaagaagtacccatcaaaatatgtctacattaaaaacgataaacttgcttggcttgttggtcttgccttgttagttgttactgccgtagcaaccatccttggttttgcaccacaagatgttaagcaaggcagtggcctttggtggtacgaattgatcattaatattgtagccgtaattgtcttaattggtttgggtgcaattttacctggaattagacgtcgtgaagaagaatacggtattgcttttgacaaatctcaatggatttggatgggaattatcattatcggttctattattcttgacgtatggcttggtagtaccaagattccagcaagaatcacaatgattatagttgaagctatcgctgcattaatcattacttggattgttggacgaagaaaaccccaacaagcaaccatataaaaactaaattacaaaaaagctcgcaaataatgtcattaattatggcatgctttacgagcttcttttttgctcaaattgatatcactttcactctatattctataatcatatagtaatttacaattattttgtaattttatatactcaacaaggttagcactaagtgttatactaaagtataatggagataaggtatatatttatagaattatttaaactgagactgaataaaatgaaaaatataagaaagaagattatagtatttctgctagccttggaatgcttagctttttgtatatcctttaatagcaaagtgtatgcatcatggagtcccgcttcagaatggaaagaaaatggctatcctactgaggactggacaacagatcaatttacataccatcaaataggatttattaatgatcctaaaaataatcaattgttgttatatgtagacatttgccctgattctaaaaccaatagaaatagtcatggatatgaaggtggatatcgtcaattgcagccatcagcctacaatataaatgttggtaatgctacatacagtgttaatttagatgtcaatccatggaatattcaaaatggaaaatctggatatgcaggaattggagtatgggatcctcaaactaatcaatataaagcaactaaagataatctctgtcattattatgcagatagtgatggccgccaatcggccataattaagattccttacaatatgtttaacagagatgacctaaacggatcaactaaaatgacaatgcaaaatcctaatttgggtggcaacacaaaaatcacaatcagcggagccagcaccggcccatacatccctgccatcatcgcttttgtcttagcttcaatagccgcaattagttattaccataaaagaaagttagtacgtcatgaacatcagtaaaatatccccaaaaatatttcattttggaaatggtgtcatccgtgcctttttctttggcttgattataattagcttcttcgctgtgctctcatctactaattggctgccagatgcaaaaactacgaccggcttaacttacataatgtttgcactactattaattttagttttaagctggttctcctttccaaagtttcaaatgttcttaaaaacaatttttatcaagcataaatggattacttctattatttgtttagtccttgcattaatttggcaaattcaatttgtctacttcgtacatcccgcaatcggatttgatgttagtgctgttcacaataccataatcaatccgaatctacctgaattaagaggatatttcagtgttaactacaacaacctatccatcctccttactctaagacaagttgccaatatctttcattcaaccagttggttaacaatggctttatgttcaacacttgttacagatttaagtgttttagtaatcatcgctacaattgcgataatcaattttcaaaaaattcccaatatcatttatattctagctagtctgcttagcatattccctatttgcatggttccttacacagatgtatggtgcttgctccctatttcactttcaatttttggctggagcatcgctacccaaaaatcatatctagttgtcattcgttttttaggagcaattttatccggaattagcttagcatgtggcgtttggatcaagccttcagttgctgtttggggtattgccgcgattttaacgagtttactctatattttaaaaaacaacaaagtaattctaacttctattttctgtttaactattgcagcaagttttgttttagcctatcaacctcttaaaaaagcggttcaagatcagcattacatcatcgttaatcaaaaacgccaaattccgatgatccacttcatcaacgttggtttaacacatgatggtgcctatgatccaaaagcagctttaaaaatggatgagcttcctactaagaaacaaaaagttgtctattctaaaaagatgatcatcaagcgtcttaaaaaacgcggtccattgggttatttacaatttctagttaaaaagcaaggtctaaatactgcagatggtacattcggctggctgcatgaaggccattttattatttccaagcagccatcagaaggctggcgaggattcttagcggaatttatctatccaaatggaaaatatgttattgagtttagatttatcgctcaaattctttggacaattattatttttgtattgctattcagttttcaaaaaggcggctttattattcaaacgctaagaatggcactagttggcggttttatattcttacttctttttgaaggcggacgtagtcgttatctagttcaattcttacctattatcttgattttaacagcactttcagcagacactgctaaatataatttagataaaattttgacagcaattctaccgaaaagaggtttttaaatatgaatcttagtttaatttaccctactatctctttaccaatcattacaattagcatggttgtaactcaaacacaaatagaaaaagtatgggagaaacagctagaagactggcgtcaccatttatttatcatattgtgttttactactttttacatactccaaactgtttgtattgcaaatgtaaccatctttacctttaaagcaattgcttatatgtatgtcattccaacaattatggtattacgcaacaagcaacatatttggtggtttttgctttttatcacaccactaattccgttacttattggtcttgatttaaagagatattcatttataaatatccccgctactttattgcagatttcatccatcgcattaatctgctttattctaaatcattgtcaaaatctttcatatcaagttaagtatatcattgccctttattcagggagtctcatccattttgtacgtctttatatagaaaatgaattacacctcacatttttaatcgctttgacaatcggaactactttcaccatcattggtgaaagctggcgttattattttgaaagtcgacatgaagaagcaattgctaaattgcattacgaaagcaagcgtgatgaattaactggtcttcttaactttcgcgcttttgaccaagaaatgaaaaatttatctaaaagacctaatataactaatacctatattggcgctattgatatcgatcattttaaagtaatcaatgatacctatggtcacttaaatggtaatattgttctgcatactttttctaaaaaactgaaacacgagattgataaagcttttgctcctaattgtttcgtttaccgctttggcggtgacgaattttcaattgtcatttttaatgctaatcctgaacaaatcatcgctgcactaaacaatgttgaacaatatttccgcgataattttatcaaacttcctgataataaaactaaaataaagttctcgttttcatgtggcttcacgaagcatttatctaatgaacatttttataacactcttgaacgcgcagatgatttagtttacaaagtaaaaaataatggccgcggaaaaatattgactgattaaaaaactaaggaaatgaataatgcttaatggatatttaattggcgggattatagtttggttatatgccctttcagtaactaatcgtgcacatttatttgctttttattattgggttggtgctattggtgcttttcttttaactacttttgcatgccacaaatattttgtctggttcctagctagcctagtgagccgcggagctggtgtgattggacagctgactcatagctttactgcttatccgtttccagctgctttagacattcaaactacttttggatcaattaccctattagttgactatgaatgttctggaattattgaaacattggcatatttaagcttattaattttctttcctatttacactcgtcgtcaaaaggttgctcttagcattatcggtgttttttggatctactttattaatatttgccgattaggtttaattgggataaccgttcattaccttaatttgcgaaccctgttctgggttcacgacgttataggacgtatctttttctatatctttacaattcttctatattatcaagtcttcactcattcacaattagtctcaaacttactagggcgaagcaaattagattaaaaaggaataatcatgtttgatcaaacagtattacaaatgggattctgggctacttggcttttaattcctgtcatatttgaagaaattccgatgataattaattttattcggcttcttcatcatcataaaattcgcaaaaaaacccctctgccagattttttgccagtattatcaattattattccgacttataattcatccaaaacactttatagatgccttaaatcgctagctgattcagattatcccaaaaatttactaggaattttcgttgtcgataatggcagcaaagatgacacctttcaagtctttgctaaagctcaaacggactatccacaattattgatgcggtggcttacttctcctcatggaaagtcttctgcattaaatgctgccatttataaagcaagatcccaatatatcattaatatcgatagtgacggtcggttggataaacatgctttaaacaacattgttaaaaaattctcggctaatccaaatatcgatgctttaactggaacaattttaaatgaatattttgaatattgccaaacctttctagcaggaagaaatattgaaaataacagcaatcatattttcacgctttctggtgccttttcggcttttaaacgcgagaccttaattagaacgtatctttacagtaccgatacaattagtgaagatactgacatgactttccaaatccggtacaatttaaagggaacgatttcattttgtgatgatgcaattttttattctgaaccaattagcggcttcagtgaactatatactcagcgacaacgctggcaacgcggtgaactagaagtcattaacaaatatttatcgcaagttttatcttggaaacaattcttcagtaattttcaaattcgtcgtttaatcattgatcacacagtcactttcctaaaaataatttggatgtttgctatttttatattattaggatttggctattcatggatatcattattgttttcttatgcggtaatttatcttttatatttatttttggagatttcgagttcaatttgtgtttacatatacttaggaagctttccagaagaaagaaaattttatcttaaaaatatttggatgatttttttactgcttttttataatttactttgttctttcattcgttgtgttgggattattaatgcttcaaccaccactacaacttggcaaggaattaatataattcaagaaggtcaacaggttaaccaaatcataaaaaaagatataagacaattattgaaaagaaaaaattatgacgactaaatatcatacttatatattcacaacttatttgaacgcatcacatgctattcgttggagtaaaggaatcgggcaggctcattcccatacttatgaaataaggtatagctttcatattaataacggcaaattgattcgtttcaatgaaattgaaaataagattgctgaaattataaaaaagtttaataatcaatttttaaatgaagttgagccattcaccaaagtaaatcctactttagaaaatttaaccgattatctattcaatcgtttcggcgaagaattaaataaattgaattgtagtttagatgaaatatctgtaagtgaatcaccaatgagaacttatcagatttcaattaggtaacagaggtaatagtaatgagtaagtggtataacgtttttcaacctatttatcaagtcgataaagatttaaatgtaacaatttcacattatgaaatgttattacgagatgaaaatgattccttcccaaataacgatttcttcagagtaattggaactgaagaagaaaatcaaaaatggattttagccgaaaaagagtcaatagatcaagcttttgctaagtaccctgatatctgtatcaatttaaacattgagcctattcaattcgcatacccaagcgtttggaaatttattgaaaatatttatagtaagtacgcgtggtgctagttaaatctttctagacaataagccaaattataagctaaaattgcaatttccaaccggctttgaaagcctatcagactacgtgctcgattgttctcggcattgtaataggtcagaagcgaaaagtcgctttcaattgttctgcgaatagccatcaattgatgatcattgtgctttttagctcctgtcatatttttacgatatggtgtccaaagttcataacccatttgttttagctgttgatgcagttctttgcctaaatagccttcgtcgccaagaagatagtaattagatggatgggcattttccagcagttcaactgtctccttggcatcatgaactgatgcttttgttacgacataatcaagaatgtaaccgtcatcgctaacaatggcatgaactttgaaaccatagaagtaaattttcttggtggccttataaccaatgttggcataaccgcgaaaaattttagcacgatagttgcgaattggttggcaaacaggtaccggaaagctgtcaatgatcaagaaatgtccattcaggtcaacctttttattcatttcttgccgtatctgataaatcaattgcaatagctgacgtgaacgccgattaaaacgtgagtgtgataaacaattgaaacattcacagaatcttctttgtgattcaattcctgtcttagcttgccagataagtaaagccaaaatcagactgtccgtagttttaatttgatcaatatttcgccgatgagtaaactcagccggtgcatacaaacgataccagtgccgacaaattatcactaaatctttaaaactaacttgtaaatggtggctaaaacgcttaagcttaagacagttcaatcagatcagactcttttctattattactatttacaagtcgagtctaacaagattggacttttttattaactaaaacgatttaactagcaccatgcgtatagtaagtatggtaaaaaagtggtcattgaagtaactgaacgtcaacttcaagctggaaccttaggtaataaacaatttgataaatctttccaaagattccatgatattggcttggacgttgttttagacgatgttgattctggtggtcatagctttacttttgtagatcaccattctgatataatcagtgggatcaaattatcattactagacttcgatcctattagttctgatactactattaaatttattgatgcttgggctagctttgctaaggaaaaacacttagatctagttgtagaagctatcagaaataaggaaattgctcaaaaatttgctggtaataaacatattttccagcaaggttattactggcaacagggagtaaaactagaagacttaccaacggtttatggatttaagaagtaattacaaaaagacagaattgattgcttaattctgtctttttttacatgtatttatttaaaaatttgtttattcgcattttatattcatgcggataagtttcgaatgaacgcgcatgagctgcacttttggcaatccataactccttaggaccatttgtagcatgatagttttgatacaccattttagttggcacaaaattatcttttccaccatggataaatagcattggcttagtattcttttttaattgcttaactgcagatgcatcccctaaataaaagccaagatttgctttacttacaccgcttaatagcgtaactgcacttgtagctactgcttgcggcataccgtataaatcttttgcttcatgcatgaattcagctttcacatcactatacccacagtcttcaatatatgccttaacttgcttaggcatcttgaggccactagtcatcattgttgttgctccgcccatactgacgccaaaaattacaatctgttgttttcttccttcaattgataaatctttattgacccattttctaacgtcatatttttcaggccaaccatagccaatatacttcccttgactttgtccatgagcacgcgcatcaggaatcaaaacattatatcccaattgatgaaacatcgccgcatagggtgccatggtatttttattattaccaaatccatgcagcaacacagcagtcttttcagaatgcttatttggaatataatttgcatctaagcggtagtttgaagaagcagacttaatataccaatgctcttttttagcgtttttataccactttttattctgcgcaagtgaatctttctttttcttgctagaatatttattcagcactgtcttttcacctggaacaaaagcaacattaaagaaatatgcttcaactgctccaattaaaacgattaaaactgtggcgactatccctattatccaccatacttttttgcgttttctattcaaaatgtcaactcctatataaaataatatagaattaattatacacttttgaattttatatggtatattgacattttaagtaaaatattgcctatacaaaaaatgatggcttacgccatcattttttgttattaatctaaatcttcaccgtgagattcaattaccttcttgtaccagtaaaatgaatccttaggcattctcttaagagtacctttaccttcatcatcacgatcaacatagataaaaccgtaacgcttagacatttgaccggtaccagctgatacttcatcaatacagccccaagtagtgtaggcacggacatcaacgccatcttcgatcgcacgattcattgccttaatgtgcattctaaggtaatcaatgcggtaatcgtcatgaatcttaccatcatcactaatcttatcaacggcacctagaccattttcaactaccatcattgggatttcgtaacggtcatacataacttcaaggtagtattgcaagccatctggatcagttgcccaaccccattctgaatacttaaggtatggattcttagcaccagcggcgaagttaccgccaaccttatcttttacttcatgagttgtgataacgttgctcatgtagtaagaaaaggtgtacatatcaactttaccttccaacatatccttcttatcttgctcagtaatgtctaagtgaacattgtgttctttccaaagacgcttagcaaatgttggatacttacccttgcattgtgcatccccacagtagaaaatattttgttcccacatatggcggttagtcaaaatatcctttggatctggggttaatgggtaatcaacgattccacaaatcatattccctaccacataatcaggatcaatttcatgagccaacttaactgcccgagcactagctacgaattgatagtgcaatttctgatatgcatgttggtatgccttatcatcagtcacattattgccaaaagcactaagcatcaacagggttgaattgatttcgttaaaagtaagccagtacttaactaatcccttgtattcttcaaacaaagtcttagcatatttcacatacatatcgatcattttacgatcttgccagtcatgatatttttcactgaggtaaagtggatcttcatagtgagaaatagtaactaaaggttcaatatcatattttttacattcttcaaatactctgcgataaaagtcaagtccagcttgatttggcttttcctcatcacccttagggaagatccgagtccaagcaattgataaacggaaggttttgaaacccatgtccgcaaacatcttaatatcatctttgtaatggtgataaaaatcaatcgctacatggttaggataatattcattaggatcaattgcaccaactgccccttcaggaagtcccgcacctggaactcctggtgttttttctaacttaccatttaacttgtaagtcaacattctaggtgcatctaagctacctgcagtagtaatatctgttactgataggcctttaccatcttcatcatatgcaccttcgatttggttagcggcagttgctccgccccataaaaagttctttggaaatgacattatgattctccttttctgaaagcatttacattaattatagactaattggtttgaacttgaccagttgttttaacttctgcgttactgccttgcaaagacaaaatttcttgaccaactttaacttcaccttgagctacttgctgtacagattcatatttcttagaattcgtaacaacaactggagtagtcacttcatagccagcagccttaatttctttaatattaaatttaaccaatggatcacctgctttaacctcttgacctttttctactaaagtcttgaagcccttaccttgcagattaacggtatccattccaatgtgcattaacacttctgcgccatctgtagtgttaagtccgacagcgtgtcctgttgggaaaactaaagcaatcttaccatcagctggggcatgaagcacaccttcgcttggttcaatagcaacgccttcccccattgcaccgcttgagaatacttcatctttaatttctgacaatggttttacttcaccgtctaatggtgaaactaatttggttgaaggattttccttttcttcacttaaaattgcttgtacaggagcactcttagtaatattagctgcttcattagcggcgtcagcaactttttgtgcttgttttttattatattcagcatcaactgattttttaccaaagagcatttgaagtgcaaaaccagctataaatgctacaataccggcaataattacgccgacaattgttgtcattgatcctcccttaggattaatgtaggccggaattgcaaagaatcccattgatggcataatgtacaatactgaatgaaaggcaccaatgattgcacctgagactgcaccagcaatacagcttaaaacaaatggcgtttttcttggtaatgtaataccataaattgctggttcagtaacaccgaacagtcctgagaaaaatgcaccagtagctgtttctttaagttttttgtccttagtttgacggataatagctaaaacaacaccaatttgcgcataacaaaccatgcaggataaacctagaattgggtcataacctaatgcggctaaatctgcagtagttacggcaacgattccccagtgaacaccgaaaataacaagtacttgccaaagagcacccattaataaaccagcaataattggactaaagttgtaaacacctgacatcactgcaccaattgcgtccccaacccaagtcattacaggaccaattactataaatgcaactggtaaagcaataatcatagtgacaactggaaccaagaacatttgcacaactgatggaatccactttttagcccagtgctcaataattgaagcaaaccaaacggtaaataatactggtaaaactgtagaagtataattcatcgtgataaccggaatgccaaagaaagtcgtgtgaatctctgaggcaaaagccgttcctttaaacaatgtacctagaacagtcttacttgcagctaattgaaccatagttggataagttaaggttgcaccaattgctaatccgataaattgattcatgtgaaatctacgtgctgcagttacccctaagaatactggtaagaagtagaaaatactatcaccaattgcatatagaatttggtaagtacccgatttagtagaaagccatcccattgcgcctactaaaactactaggcctttaataataccgccagcactaagtggagctagaatatctgtaaaaatgcctgaaatcaaagcaacggctttatccacaaagctagaattatcttcaacgtcatcatcaggaacttgtccaccgccattaaagccgccttctttgacaacagcatcgtaaacatcagcaacttcattaccaatgaccacttgatactgaccaccagctttaacaacagttacaacaccatctgtatcttttaaaacatcatcgttagcctttttttcatcctttaatttaaaacgcaaacgagttgcacagtgaacaacactggtcacattatctttgccaccaacattttgaatgatggtcttggctaattcatcatagttcttagccatttgcctttcctccttaaaataaaaacccaagctactcaaaaactaaagaacataaatgttcaacgtctttcagtaactcgggttcatgcctaatcttcttagtaacatacctaagtaacttagatatttaattatcttgacgactagttacgcgccaaatatgtaaaacaagataaaattcatcatctgaatctaaatcccatcccatttttgcatgtaagtaagtggtgatccgctccgccgtctcatacgctttgctatatttgattttcataaaacctagcattgcaggatcaagtgaagcctcctccttttgcttatttcgtaaaaatctaactaacaaaatgcgcaaatgcgaaacaaacctactatagttaaaggagctcgtatcaagttgcattgaatattgcaattgaataatatcgattatcccacgaatcaaatttgtaatctgaattgtttcttgtacttgagaaacatcactcttagcattaaccaggtgataggtcatcaaaaccgactcactctgcggcaatttaatctgcatctcctgattaattagattgaccacttttttagctgccgcaaattcttttggaaaaagattttgaacttcccaactattgttagcgggagctatatcaatatgatctttaattcgcgtaactgcaaaatcaatgtgatctgctaaagcaagatactgaaagtcattgaacttaatctgaagcagaggttcgaccagctgaagtaccttattagttacttcaattgttttagggtcaaagcccttaacttgatccacttcgtctttagtaacgaagcgacgttcaattttgctttcatcaacaggatcacttttttttagaccaaatcctacgcccttgcctaggactatttcttcttgaccttggttattttcaattaaggcagcactattattaaatgttttaagaaatttcataataattcaccaccttagcaaaaaaagaaaaagctatcacaaataatgatataccaacgcaacattatttgtaatagctaagacctgatcgtatcagtaatccgctcacttacagttattataatagccaacattgtaagcggtgtcaatataattttgtgaaaaaatgcaaaatattttacaatgaactaaaaagcgaggtaattaaaatgaaattcgttcttgcacctgattcatttaaagaaagcatgacagcaaaagaagtctgcattgcaatgaaaaatggtattcaaaaagttattcccaatgcacaaataaccgcagtaccaatggctgatggcggcgaaggtacaactgattcattggttgacgctacaggcgggcaaaaataccaaataaatgttaccggtccgcttaatcaaaaagtatcagcttattatggcatctcaggtgatggacaaactgcaatcatcgaaatggcacaagctagtggtctctcttatgttgcaaaaagtaaacgaactcccgaaacaattttaaagactacaacttatggaaccggcgaattaattaacgcagctttgaagcaccacgttaaaaagattatcatcggcctgggcggaagcagcacaaatgatggcggtgctggtatggcacaagcacttggtgttaaattttttgatcaaaatcatcatgaaatcacccaaaagctagcaggcggtgctttagatcaaattgtcaatattgatctttcttcaattaatcctcgtattaaagatacccaatttttattagccagtgacgtaaccaatcctctaactggacctaatggtgcaagtagcgtcttcggcccacaaaaaggcgcagatgatacaactgttaaaattctagatcaaaatttatctcactatgcacaagtaattgagcagactattgataaaaacgtcgcccaaatttctggtagtggtgctgctggcggcctaggcgctggcctgatcgcctttactaacgccagtattcatccaggcgtgcaattaattgcccaagaaactaagcttgaagccaagatcaaagacgctgactatgtttttaccggcgaaggcggaactgattttcaaactaagtttggtaaaacaccctttggtgttgctaaaattgctaaaaaatatcacattcctgttatttctttagcaggctatttagatcaaggtattgatcaactctatgatgaaggatttaccgctatatttggcattcttgctaaagcagaagatattgagcaagccctaaaagatggaccaataaatgttacccgtacaactgaaaatattgttcgtttaatcgcacaaaaataagatgagctcgatgcccatcttattttatttcgttaatttcttaattaagccttcacagccacgataaatttcattatacgctgtttcaaaatcatttgtataccaaggatcatcgacatcagcataagagccagcaaactctaaaattttatgttctttatgctctgggtctccaccagtaatgcgattcatatctgcgaaattttcttcatccatgcagattaaatattcataattatcatagtctgagcgagtcatttgactagcacgatgaccacgatcatatggaatatgttttgcaactaattcccgttgtgcacgagcatcaatcccatgacctaaagcatcctgcgtagttgctttagattcagcagtatattgatctgctaggttattttcttttaacaaatattgcatcacggcctctgccattggtgagcggcaaatattgccatgacaaacaaacagaatttttttcattaccttttcttcctcttagttagtctatttataaccggccaaataatcgccgtaataactccaactgttaagccaacccaaatctcctgcgacaaagttacaagaatgccactataaactcgactttgcaatgcggtcatcgcctcatttgaggcaagccacaatgccacaaatgaagcaatagtagctagtgctagtggaattgacgccgaagagcgaccaaataaaatcaaaattgcggctaacaaaaataacaaagccactgcaaaaattgaatactcataaattgtaataatatggttcacatcttctgaatcttccttcaatttatgattaatttgcttgactaaatattcattgataatttcttccaacttacttttactagttaagcctaaatctttagtggtcaattttccctgatcattatatttttcacacaatctatatagatcagcatatgataagttaacttgatatttcggcggcaattgttctaacaatgtcttttccaaaccagatgcttcgagtaactcaacccctgccttcaaattaggattatctgagtcatccactactcgattgattacttctttgcccatcgcctgtgtatcgtttatttttaaattcacattgctagtcattaataaccaaaaagatactgcggctaggccgaccattatcaaacgtagtattattttgacgatgttcttcatctaaaaatcttcccctaacatctacttttttcagatggcaaacaattgcaaggcaccatgtcaggagcatccttttctttcaatttaagttcttgctgcatcgtcttaatatcgcccttagaaagcggtgcttcttttagcaactgaattaatacctcacccttgtgcatatcacacatgttttgcatcatatgtaaagtaacttcagacatcattttgcgctgactaatagtcggcttataaacaaaacaccggccttctttacgcgtctttagcaagcccttttgcactaaacgccgcattagcgttttaattgtggaatcggaccaatcctttttaccttgtagttctttgattacttggccagtacgaacttctcctaaggtccaaataatacgcataacttcccattctgattgggtaatggaattacgatcgtctttagtttctgccataaaacatcacttctaaatccaaattttttactaaagaacaaattttttcaaagcctttgcaatcccgttgtgatcattatcatcagtaacataatcagccttatctttgatctcactaatggcgttacccatcgctactttcatgaagttgggattagaaaacatcgaaagatcattgccttgatcaccaaaaatcatcacgtctttttgggcaatttttagccgtgaagccaaatccattaaagcattaccttttgaagctcccaaggcatttaattcaataatactgtcaaaactgcgaacaatgtcataagtctgaaaagcccagtcggggaaactattccacagtttttctacctggtcagctccttcagttgaagtaaaaccgactttgttaaaagtaaaatcttttggaatttcttttcggtctctaactttcataatattatcggtcaaagccgcattaatttgcatttgcacagataaatcccgatcagttgtaatgaaatacttagtcgtctcaaaatgtacatttacatgacttaaacgctgaaaacgcaacatattattgaagtcttgataattcaattcctgactcattaaaacacgaccagaaattgtttgaattactgcaccattaaagacgattgcatattgatcatcaccttcaattcctaattgcttagcaaagttcaatactcctgataatggtcgtccagtagctaaaacaaccttaatcccattttgtactgcgacacgcaacattctttgcgtttctggcaaaatagtattattgcttgataataaagttccatctaaatcaaccgcgatcaatttaatagccattttaatccctcggatcttaaaaattacatctagcattaattatacaaaaagccgtgatttaactcacgactttttacttatcgattattcaattaggattttacttacccatttccttttcgaccactttaacgatacggtctacataggcatcagtttcttcttgagttggtccttcagccattactctaagcaagtcttgagtacctgatggacgaacaagtacacgaccatttccagccatatccttttccactgcagcaatttcatcaagaattggttggtgttctttccagctcttcttgtcagcaaccggaacattaactaggcattgtgggtaatctttaaagtctttcaaaagttcacttaatgacttaccagtcttcttcattacgagcattaaatgcaaaccggttaacataccatcaccagtattatgataatcactcataataacgtgacctgattgttcgccacctagattgtagccgtgagcacgcatttcttcagaaacgtaacggtcaccaacttgggtacgaacattcttcaagccttctttttcaagagccttagtaaaaccaagattactcattacagtagtaacaatggtatctttcttcaaacgaccatgttctgccaagtatgagccgagtacgtacatgatgtggtcaccatcaacttcattaccattttcatcaacagcaatgcaacggtcagcatccccatcaaaggctaaaccaagttgagcaccttgcttaacaacttcttcttgtaacttttcagtatgcgttgcaccaacatgatcgttaatgttcaaaccatctgggtgagttgcaatagtagtaaagtcaacgccacaatcagcaaacagtcttgagatcaatgcgcttgaagcaccgttagctccatcaataactaccttaattccacccaagtcttctggaatagtattttcaataaattgcaagtatttagctgaaccttcgtggaagtcagttacagtacctaatcccttagcagatggacgaggtaatttatcttccttagcgtcaattaatttttcaatttcgccttccatttcatctgaaagcttcaaaccatcgctaccaaagaacttaatcccattatcttctacagggttgtgtgaagctgaaatttgcacccctgcatcggcgccttgtgctcgtactaagtatgaaagacctggagtagtaattacgccaacctcaagcacttcaatcccaactgaaagaaggcctgaaatcaaggcatattcaagcatttggcctgaaatacgagtatcacgagatactaataccttagcttgttcgccgtcttttttgttcttagttaaaacataaccaccatcacgacctaatttaaaagccatttctggagttaagccttgattagctacgccacgaacaccatcagttccgaaatattttaacatttaataaacaacctttctcaaattaattattcgcattctttactttaattgatatctgtacattttcaggatcaacgcgagcaactcccttaggtaaaactaaagggtaattctttacagttgaatatgagattcctttcagatctacatcaacatccaactgcttaatctttgctaatgtttccttttgtccatacagtgttacctcatcattcttggcagtaaccgaatagactttattatttttttcatttttaggctttaaatttagcttaactttctttttgaaaagcgatattggcaaactagcttttactgtagatggattaatcactgcatttaattgacgcccttttttatcttcagctatcaaaataacttgacgctcataatcatgattaatgccattaggtaaaggcaacttggcaacgatctgatcaatctgatttacttcgcttctagcaccagtaacctcaacttgctgcggatcaacactagccgtaccaatattatatccattagcaacagcatttttattatactctatttgaacgggcatggtacgagattttcgccgttcaatatcaacattaactgttgccgggttaatcgtgtaagataattgactatttagtcccgtaacttctacctttacggtttgcttacctattttcttatgagttagatcaatataagcacggaagctttgagtattaacagtcgaagtaaccaacgcattcgaaccctccaaagttatcttaaccttttcaggataaccaacaacatagtatttatctgtattaaccgaaacttgcagaggaacactaattgtctgcgtttcattagcagtttgccgtgtcttcttagattcaccctgtgtaacaaaacctgtttgagtagagtcaatgtaaaccactaataagatcgcaaacagcaatgagattattctgattacccagcgtttatcccaaaagtctttcatcgatctgcaccccatttccagactttattaatcacacgacgaatccatggaaccttcttctcttccttaggaacaagttgagcattcaaatacttcaaatattcttcacgagacaaatctactaaaaagcgcccgtttctagtaatagttacgccaccagtttcctctgagacgacgatcgttaccgcatcggtaacttcagaaataccaacggcagctctgtgacgcgtgcctaaacgcttaggaatcatgctgttatctgacagtggtaaatatgctgctgcaacagcaattcgattattattgataattaccgcaccatcgtgcaacggcgtattagggataaaaatattaattaataattcaccagaaatatccgcatccagcttgattccagtttcaatataatcatctagccccgtatcttgttgaatcgtgattaaggcaccaattcttcttttagacatgtattgaatcgctttatcgagctcctgcaccatcttaaccgactgtgtatgagcactctcacctcggccattaaaaatcggcgtgcgtcctagccgctctagtccacgacgaatttccggctggaaaataacgataattccgattactgcccaagaaacaatttggtccacaatataagttaccgcatgcagttgcagtaagccggcaataattctaacaataaagataaagacgatcccttttgccagttgtactgctttggtaccacgaatcatcatgatcaaacggtaaactaaataccaaatgattaaaatatctaaagcaatggagaaattattccaagtaaacagattagaaatattaaaatgcattgattgctcctttcttctttaattataaccgccccaatttaccgtgcatacattttaaattctaaaaataggtcattatattcttgggtcttcttaggacctaaatctctaaagacctgtagattcttcaacgtactttgagtaggataaaactgccggtcatctctaacttttttcggcaataatttttgggctgcggtatttggggttgcatatccaacatattccgcattttgcgctgcatttttaggttcaagcataaaattaataaacttaagtgcagcttttttattttgtacagttttaggaataacaaaattatcaaaccacaaatttgatccttgcttaggcacaacataatgcaagtgaggattttgttccatcatttcataagcctcaccagaccaggtaacgccaattgctgcctcattttgcactaggtacatcttcatttcatctgaaataatcgccttaatattgggtcccagactattaagcttagtttgtgccaaatgtagtttaatactagatgtggtattcattgaatatcctaaagaaaccaatgccatccccattgcatccctagctgaatcaactagtaaaatttgcctgcgatactttttactccacaggtcattccaagtcttaattgcccctggcttgacgaatttatcattataaacaattcctagtgtcccccagaaatatggcacagaataatcattattttgatcaaatgacttatgtaaaaaactcttgccaatatatttcaaattaggaatttgcttttgatccaactgatcaagcaaatgagccttgcgcattttagttaccatatactcagaaggaatggtcaaatcatatgccgttccgccttgtttgattttggtatacatcgcttcattggaatcaaaggtctcatagacaacatgataacctgtctgcttttcaaacttttttattaactttggatctagatagtcgccccagttatagataatcaagttttgtttatttttcccggtagacgatttctccaaatgatgggataaaccccaaaggcctgcacaggcaattaaaatagctgcaattgccatcataatctttttcatttaactaggcctcccatcacacgatgatttttctttctgccctttttagtagtaataaaataatagattcctacaagcaacaagacaaaaatgaacattacggtacttaaagcattaatctcaagatcgattccttgtcgtgcccgagaataaatttcaactgaaagagttgaaaaaccattcccagtaacgaaaaaagttacggcaaaatcatctagtgaataggtcaacgccataaataaaccggaaaagatgcctggcataataactggaattaaaacatcactaaaaacctgccatgaattcgcccctaaatcacgtgctgcatcaataagcgacatatccatttcattaagtcgcggcaagaccatcaaaaccacaatcggaatagaaaaggcaatatgacttaacaatacagaaccaaaatttaagccaattcccaatgctgtaaaaaagatcaaaaaactagcaccaataattacatcaggtgacaccatcaagacattgtttaatgctaaggttgttttcttattagattcttttttcatcgcagcaattgcaattgcaccaaatgtcccaataattgttgctattaaactggacaacagcgctagtaggatagtttccaaaaatatcgctaataagcgattatcttgaaataaagtctgataatgagcccatgtaaagtgctcaaatttattcatgtttttaccactagaaaatgaaaagtaaatcaaataaaaaatgggtacatataataggatcaaagtaaaagcaagatagatcttagcgattaaatgtctgtttctcataaatctaccttctttcttctagcctttttgctagtaatcaacatgactaccaccatcagcgcgattaaaattactccaattgtggcccccatattccagttcattgtggtcataaaatactcttcgatagcagtccctaatgtgattacccgattgccgccgatcagccttgttaacataaataatgacaatgatgggataaagatggcctgaacgccgctttcaactcctggacgagaaagcggccataaaacatagcgaaaagtttgccatttactagcacccaaatcctcagaggcatgaatgactgcaggattaatctctttaatcgcattaaaaattggcaaaatcataaacggaatttcaatgtaagtcgccacaaaaataaaagcaaaatcagtaaacaaaatatttacgggaccaataccaaataaatgtaaaaatttatttactaaaccgtcattacctaaaatgccaataaatgcatatgctttaagcagcaaattaatccatgttggcaaaatgatcaataacagccacagctgctggtttttcattttaattaaaaaatacgctgccggatacgaaattaccaacgtcaacaaggtgatcaaaaatgcataccaaaatgagttaagcatcatttttaaaaaggtaccatttttaaaaaattcaacgtaatttctgagcgtgaatgcgttattactatcagtaaacgaataccagagaatcaataaaatcggcaaaatgacaaagagaataatccacagcagatatggaatcataaaaaacatctttttatttttcattttcatccgcctcatacttttctagtcgagcatcaaaatcgtgttggctttcatttaaccgcatgacgtgaatatcttctggatcaaaaaagagcccaacacgttgtcccaatttaactccattagtagaatggatcagccattcattttcattggcatcaattgccttaatctcaaagtgatcacctaaaaataattgcgtctgtgctgtaaccacaatcttcccatcttctggtttaacaatatccaagtcttcgggacgaataactacttcaaccttttcattaggcttcatcccaccatcggcacatttaaatttattattagcaaattccacttcgtaatcatgaatcattcgaccagataaaatattggagtcaccaataaaacgtgctacaaagtcattcactggctcatcgtaaattgctaccggattaccactttgttgaatctgcccatcatttaaaacaaaaatttcatcactcattgatagagcttcttcttgatcgtgcgtaacaaaaataaaggtaatgcctagctttttctgaattgcccgtaattcaaattgcatgtcttttcgtaaacgtttatccaaagcagatagcgactcatctaatagtaaaaccttaggttcattaacaattgcccgggcaatagctacacgctgctgctgtcctccactaagttccgaaatttcgcggttagcgtaaccgtctagacgaaccatatgcaaagcatctttaacagctggcttgatttcactcattggtcttttcttaattttcaagccaaacgccacattttgaaaaacatccaggtgtggaaacaaagcataattttgaaaaactgtattgatatgtctttttgaagcatcaaggtcagtaatatcattaccatcaaagaggacttgaccactagatggctgagtaaagccagcaataattcgcaaaattgtcgattttcccgagccactaggaccaagtagtgaataaaatttaccagattcaatagttaaatttatatcttttaatgctacaaacccatcatcatattttttggtgatgtgttttagtttgataatatccatttccatccctcacataaaaaacagctgcaagccttccagcctgtagcttgtctttgctaaaatattttacttttctttgccgataatcctaacttctgtgcgtaagtcaatgtcaaacttttctttaattaccttttggatcaaatgaattaaattcaaataatctgttgcagtagcaccgcctttattcacgataaaacctgcatgtttcattgaatcttgagcgccaccgatttgtttaccttgtaaaccagctttaataatcatcggaccaacaaagtgcccagtaggccgcttaaagacactgccacaagatggatattcaagtggctgcttataacgacgtaaagcatttaaataatgcatatgatctaagatctctaacttatcgcctgacttgagtgcaaaagtggcgcttaatacaatatcgccattttcttgaactaatgaatgccggtaagaaaagttcatttctgcgtttgaatatgttttaaattctcctgctctggttaaaacattaacgctttgcactacttcttgcatctcaccgccataggcaccagcattcataaaaataccaccgccaatactaccaggaattccagcagcaaattccattccgctcaaaccatgatgagcagccgcaaaagctgtatcgataatccgtgcaccagcatcagctgtaacttgattatcttctactttaatctcttttaattcagtcaaaataattactaacccatcaattccgccgtcacggatgattaaatttgaggcattgccaataattgttaatggaatttcattttcacgtgtgacttttactaattgttctacttcatcagtcgtcttaggaaaggccaaatattcagctggtccacctgtcttagtaaaagtatatctgcttaatgggatttgctctttaatatcaatccctttttctttcaaatcaagtaattccacgctgttgcctccttaaagtttcttgttttattttaccgcataaaggcgttagcttcattaatattaatgatatacttttttaaaaggagaattttatgaattttattgcaatggactttgaaacagccaaccattatccagaaagtgcctgttcacttgctttggtaatggtgagaaataataaaattgttgatcgcttttatacagtaattaatcctcaaatgccatttgacgcgcgaaatattcaagtacatcaaattacagctgaggacgttaaaaacgctccaacaatggcagaggtctggccccacattaaagaattgtatcaaccaggaatgcttgtagccgcacataacgctcgctttgatactaatgtcatgcggcaaagcctggcacgttacggtattgaggagccccactatttggtcattgacactttagctagcagtaaattactcgaaccagaactgcctgaccacaaattagacacagtttctgaggccttaaacgttgaattgtggcaccaccataacgcattaagtgatagtgaagcatgtgctgggattttaatcaagcaagaagagcaatttggtgatgaagcaatcaaaaatttggtttatcagatatgaaaaatctctaggaattttgatcctagagatttttgctttacttattaaattcagttaacgcagctttgacccattcttcattgcgcttaccatgaggagtaaattcaacaacccgtttagttgaatcccaactatcgtccactctggtaatcgtaagttgcaaatactcatctggcaaatcattcattactagttgtggccattcaattaccactaaacctggttctgctaaatagccctccaaatcaatcgaggataaatcatcattttccaaacgataaaagtccatatgaaagagcggcaacttagcttctcgatattcacgcacaatggtgaatgtaggactcttaacaggccgatgtatgcctaatgctcgccctaatccttgagtcatggttgtcttgcctgcacccaaatcaccatttaatagtaataaatcgtagggctgggccgttttggctagggatgcacctaatttctgcattccatcagcagaattaatttctaactttgtcattacttttcatcctttgctaaagcttgtgcggcagtaacaattgctaaatcataaatatcttgttcactgcagcctcgagataggtcattcactggagctgctaaaccttgcaaaattggaccaacagcagtgaagccacctaatctttgaaccatcttataaccgatattgcctgattgtaattctgggaaaacaaagacattcgcatgtccagctacctttgagtttggagccttcttttcactaactgcaggtacaaaagcggcatcaaattgcaattcaccatcagctggaatttctggatgatccttttggaacatagctgctgcatcatgtaccttatcaaccattggtccttcggctgaacccttagttgaaaagctcaaaaatgcgaccttaggatcaatttcggccatcttggcagtcagagcagattgatagccaatttcagctaaagtttcttcatcaggattaatgttgatggcacagtcggcaaaaatgtaacgctcatcgcccttttccattacgaaagcgccggatactcgatgcatccccttagctgcatgaattaattgtaaagctggcaaaacagtgttagccgttgagtgagcagcaccggaaaccataccgtctgcttttcccatcttcaccaacatggtaccaaagtaattaccttgggctaacttgagctttgcttcagcaatactggtatcttttcgtctagctttaacaaattccgctgccatttgatcaagttcatcataatgattgaggtcatagatcttaacaccagctaagtctaaattattttctttaactaacttagcaatctcatctggatttccaattaaaattggttcgataatgccatcttttttcaaattagctatggcagtaagaattcttaaatcatcgccttctggaaaaacaattcttttcttatcttttgctgcttcaacttgttttttgaataatgaaaatacgctcattttttacctcttatgctaaatcagatttacttatcgtttctggcaattgccagtcaatcggcgtttcatcaaagttcttcaatgccatattacaccgcgaaaacggtcgcgagccaaagaaccctcgatcagccgaaaatggacttggatgtgatgatttaatgataaaattcttactttgatcaattaatggaatcttgttttgagcaaatcgaccccacaaaataaagacgacttttccacgctcactcagagccttaattgcagtatcagtcacatcttcccaacctttgccttggtgaccgttagcatgcccatacggtaccgtcaaaaccgcattcagcaaaagcacaccttgatcggcccacttttttaagtaaccgtgattaacaggccgagctccgacatcatcatagagttccttatagatatttttaagtgatggcggcaaagttgtacctggcatgacggaaaaactcattccattagcttgaccaggattatgatatggatcttgacccaaaattaccactttagttttagcaaacggtgttaatttaaaagccgtaaaaatatgatacatatcaggataaatttgtttagtagaatattcttcttttaaaaaattatgcaattcgtgatatttctcacttgcaaaaacaggatccaatacttgatcccaatcgttgccaattaattctttagccaagtcttacaccctcttttcttctcctctttatggtatcattaatttaatactaaatgggagagaaattatgatcaaattagttgcttgtgatcttgacggcacgttgtttaattcagagatggctgtttctgctgctaatgcaaaagctgtgaaaaatgcacaaagtagcggcattgaatttttaattgcgactggccgggccccacgcgaatcacgttcagttctcaaagatgctgatttgcataccagttttatcaatcttaatggtgccctggtttttgacgaaaatgagcaattaatgatcaaacacagtattcccaaggcaaaagcacaacagctagtgcatttactacatcgatcaggcttttactttgaaattttaactgccaatcaggtttatagtgaaaatctagatcaacgtatttcaaatgtagctcatttaatggtagatctaaatcctctacttgattttcgtcaagctgtagcaatttctgctggtaataagactattatgaatatgaaacaaatccacagtttcgataatttattgcaagatcctaaaatagaagtaatgaaaattattgcttttgactctcggggacatgaagcttttaccgatatcaaaaaagaaatcgctacaatgggcgatctagtagtaacttcaagttcatcttctaatattgaaatcaatgagcaacatgctcaaaaaggtcttgccttacttgattatgccaagttaaaaggtatcgagcctgaggaaatcgctgcaatcggtgataatttaaatgatgagagtatgatccgagcagcaggtactggcgttgcgatgggtaatgcgattccagctattaagaaaatagctcaggtagtcaccaagcgaaacaatgaagatggagtagcttatattttaaataaatttattgcagataataacaatatttaaagttatgaggtgagtaagtatgcgattttggctagaacttaatcaggaaaaggattacggtcaaattcctgtgcttaatcaaaatggaaaagctgaattttttattcaaggcaatcttgataatccaaaccacactttatatctaaataatttccgtaaacaggaagtgggacgtctgttttctgatggtgcgggcctaattgcttcgttcacaattgatgtcgtcaaccactctttagtaggcgtaaaaaagttaaacacacctattgcaaacatattctatttgacccaattaaagtatattgttacaggtagtattaaacgtggtacttatacttttcgttctggaatcaagagtgtagcaagtgtccaaacaatcatgggagatcgcggaggcgttttaatttgtgatattactaagcctgaagacgtcccctttattcttttgacatccgttctatttacacaatggcatgttacgcctttgaaactgcctagttttccgccaattggatttgaggtaaatccaaattaaacaaaaaagcagtcatgaaaattttcataactgctcttctagaaagtgatatagatatagatgtatcttctgccataaagtttatatttattaagtaataaggaattattaggcagagactgaataatgaaagttaaatctaatttgattcaacctccatagcttattatacttcgttcagccaaaaatacaagggctagatgttattattttactttaaagatagctaaataatgcatttagagctagcttatagcttaataatttgttatttaacttagtacatctatttttctaaacaagacaactttaatttctacgtaaattgcaataataaattgaacacttttaatcaagctgcttgatagattagatctaattctctttcaaagatttcatctggtgtatgatatgccaatatctttcttggtaaagagttgcaccaggtttcaatgtctatgatgtcttgtagtgaataattgtctattgcctctcccttaggaataaatctgcgaatgagtccattatgtctttcaacggttcccttgtcacaagatgtataaggatgagcatagtaaactaaagtatttgatacgtcttctaagcttgaaagatctgcaaactctgagccattatcagtggtaatggttttaaaaatatcattccaatgttcgctgtattgcctttggagttctttaaaggcctgcatgacactgacagaagtcttgtcaggaatacgaagaattaagaactcacgactcatacgttcagataaggttagcagcacctcatcatctttgctcttatgtccgagaactaaatcgcattcccaatggccaaactcattacgtttattgatttctttaggacgttcttcaatgcttctgccaagttttttcttatttctgcgaatacgatgaagcttggtattgcgtttaagcttctctggcaagtcgtaattatgtatatctaatagaccttggtcgacataattgtaaagagtcttagtacagacaacatctctgctgctaaatgcgccaacagcggtggcgcgattactgcacacatcaagcgaccagccgtctttaaagaaatgtttgtggacatagcgcatgaattgagttttcctgagaaagtctgatttacgtccacaatttttacgatgagcttgatatgcatcatgcccttgagtagccttatatcttttgactttgccatgatacagttctacagtaccgcgcttaacctcataactgatagtagaaggggaacagtttaattcacgggcaatggcacgcaaagaatagccatctttcaaacgcaattgaataataactctttcctcgaatgataaatgcttgcctttaatgtgatgattcatggtagaatgtaaagagtccattttgacctcgtttctaaatgttgtgtggtaactacattctatcaaacaggtccgaatggactttttattttttattaagtgttcaatttaattttacaatcagcgactttaatttctattaaaaaatatagtgaaatgatcaagtgatttatcaatggcttgatcatttttatttactttatcaacgaacttgtttttagctatcaaactatataaaaaagagccaaatctaatgatttgaccctaaaaattctagattattaatctaaattattttttatgaattagtcttggtagtttaccaattctaagaatgattctggtactaatgaagcaccaccaaccaagccaccgtcaatatcaggcttagccattaattccttaacgttagctggttttacagaaccaccgtattgaatacgaacgttttctgcagtttcttcgttgtacaagtccttaacagtttcacgaatagtcttgcacatttcttcagcttgatctgatgaagcagtcttaccagtaccgatagcccagattggttcgtaggcaataacaagtgaagatacttgttcagcagttaagccgtctaaagcagccttaatttgagcaactacccagtcttcttgcttgttagcttcacgagtttcaagtgattcaccacagcaaatgattggcttcaagccattagcaaagattgccttagccttcttgttaatgtcttcgtcagtttcgtggaagtaaccacgacgttctgagtgaccaataattacgtagtccatacccatttctttcaagaccttaggtgaagtttcaccagtgtaagcaccttcgtcttcaaagtaacagttttctgcaccgatatgtaagtttgagccttcagcagcttttctcaaagcgtcaaggtcaactgcaggtgcacaaataagtgattcaaccttacttgggtctggtaacttatccttaacagcgttaacgaattcagtagtttgttctggattcatatgtaacttccagttaccagcaataattggtgtacgactcattaatctattgtcctttccttactattacttgtctgaaacgcaagcgatacctggcaattccttaccttcaaggtagttaagtgaagcaccaccaccggtagaaatgtgggtaatcttaggagcaatgcctaattgcttagcagcagcagttgagtcaccaccaccgatgatagtagttgcatccttaaggtctgccaatgcacgaccaacttccaaagtaccttcagcgaagttaggcatttcgaatgcacccattgggccgttccaaacaacagtcttagcatccttcaagatttccttgaacttttcaacagtcttaggaccgatgtcaagacccatcatgttgtcaggaatatcatcaccaacaacttcacgtgaagcatcatttgagaattcagttgcggctacgttatctacaggaagaacgatcttgtcgccagccttagcaagtaattccttagcaaggtctaccttgtcagcttcaaataatgatttaccaatgctgtggccttgagctgctaagaatgtgtaagccataccaccaccgattaaaatatggtctgacttaggaattaagttttcgataacaccaatcttgtctgaaaccttagcaccaccaagaatagttacgaatgggtgtactgggttttcaacagcatcacctaagaacttgatttccttttcaagcaagtaaccagctgctgcaggcttgccagcttccttcatagcagttgcgataccaacgtttgaagcgtgacttctgtgagcagtaccaaatgcatcatttacaaacatgtcgccaagacttgcccagtattcgccaagcttaggatcgttacctgattcacgcttaccaaagtcgttgtcgatgtcttggaatctagtgttttcaagaacgataacatctccatccttcatgttgttgatagcgtcttcaacttctttaccttcgtttgatggtacaaaagttacaggcttcttaagaagttcacttaaacgttcagcaactggctttaatgataattccttcttgtcagcatctgacttaacacgacctaagtggctaagtaagatagccttgccaccgtgttcaatgatgtacttaatagttggaagtgcagcaacgatacggttgtcgtcaccaataacgccatccttaattggaacgttaaagtctacacgtactaagacctttttgcctttaacatcaagatcgtcaacgattaatttagccattataatcctccgattattttgatattttttcttcaaaaaaaggcggaaggaagaatctccctccgccttctcaattaccacttaactatataatcagttaattaaaattaatgattaaagagttgcaaagtgtaataaagtacgtaccatttggcaagtgaatgagtattcgttgtcgtaccaagcaacagtcttaactaattgcttgtcacctgcagtggttaccatagtttgagttgggtcaaagattgaaccagcagtcatgttaagaacatcgctagaaacaatgtggtcaccgttgtaagcaaatgatgggctttcgtacttcttcatagcttcgttaacttcgtcagcagtaaccttcttgctcaagattgataccaattcagtttctgaaccatctggaactggaacacgttgtgcgtgaccgttcatcttaccgttcaagttaggcaataccaagccgatagccttagctgaaccagtagtatgaggaatgatgttttcagcagcagcacgagcgtcttgttccttaccactacgtgaaggaccatccaaagtcatttgagtaccagtgtatgcgtggatagtagtcatagtagcaacttcgataccgaattccttgtccaaagcgttagccattggtgcaagtgagatagtagtacatgaagcagctgaaacaatcttgtcatcagcagtcaaagtgtcttcgtttactgagtaaacgatagtcttcaagtcgttaccagctggagctgagatcaatacacgcttagcacctgcatcgatgtgagcttgtgacttagccttgctagtgtagaaaccagtacattcaagaacgaagtcaacaccatcgttcttaacccatggaatgttttgtgcttgtggttctgcgtatacgtggtaactcttaccgtcaactacgattgaatcttcagttgatgaaacttcgtggttgaaagtaccatgagtagtgtcgtacttaagcaagtaagcaagcattgctggagtagtcaagtcgttgatagcaacaacttcaatgtcctttgacttttcgccaaggtccataatacgacggaatgctaaacgaccgatacggccgaaaccgttaataccaattttaactgtcataacctaaagtcctccttaagaactataaacaacatttattttaaacgggatttcatttcccctttaaaatcatatttgaggcgccctcatcagtgattagccaggtttgatgaggcgcattaggcatataagctttaattgcttgagcctttcgggcaccacaagcaaaagcaaatatgtggggtattttgtataggttctcgaactgcaatccaacctgggtgatgcggtcaacaaccttgccatgttcatcgaagaaacacccgaaacattcggtgacggctctcttctcacgaagttcagatagcttaattgaattatagcctctgcgctgtgccatttcttgagctaacccaataccatgaatcacagcatcactttgagaaatgtcttgcagaacatctgcgatcgaggactcacgaatcaaagatttgtaagcatcatctgaaacctgctcaggtaaatataatgtcttataagtacctgaagtcttagcagccatttcttggacgattgtattactttgcgtctctacattttcgcccaaagctcctcgacctggaacaaattccaactggcgattgttagctaaatctggtgataaatacttagcagatctagctaacgccgctccacctagaattgtaactattgaatggcctaaaggcaagagtaaattcaaagctgaacttaatttttctcccatctcctcatatactcggtcttggaaatccgcattaccagggacgatcaatgttctttcaatccctaattttttggctaatgctacttccgtttcaccggcattaaagaggcgatcaagcaatggtcctgcatcttttaatgttttctcacccttttcagttaaaaacatcccaaaactttttgtttcaatcaatcctaattgacataagtactcagtctcagttctgatgtttctctctgaaagccctaaatgctgagcaacactccgacgtccaattggcgcatgtagcgaaatctgctcaaggacaagatacctttgtcgaagaatctttaagacgtcgggaacgagcgcttcgagcaaagaaaagtccgaatccatcgttccctcctttccatgggacatctatcgaccacctacgtgtcgttttgtgtcccagaatgcttaaaaatataagagaaacgtacttttcattcaattcatacatttcccaatcgacactgttagtataacaatgtatttttcgtaattcaagaaaaagatacacgattttaaaaaagtcgtaaatcgagtaaaatcatttttatttcattactttttttgatatactaccacttgtgaatcatctgggcccttagtgtaatggatcgcacataagattccggttcttagaatctgggttcgactcccagggggcccatataactacatgttgaagactaccgccatctcggtattcttctttttttataccaaaaaagcattcctcacggaatgcctttttcaatatcacaattatttagtgcttgtagtcatcaactcagcacgttgtgctaactcagtgtacaaagttgagcctgaaacagataaaccttcaatttcacggcgagtgttgaaatgatggctacccttataagtaccatttgctgctacacggaagatgtagtcgttaaaaccaatatagaattgattgtggttgctgtcataagcaaaaccttgaactggtgaaccagttacgaaattactttgagtagcaccgatttcttctggagcccaagtgtcaccatttctagttaacttccagtattcatattggtgacgaccaccattgtggaacaatgcatacatagtgttgtcgccaacaaaggttgcattatggaagtaacgaggatatgcactgctgccgttccaggtcttaacagtccagattttgttaatcttcatatcactctttcttacttgcataatttcttctgaagctgttgaattagcagtcttattgttattagccaaaacataaatgtagcttgaagaagagccaagtgattgaccatgacctagcttaatgtatggtgaaactttaatattgtttgcgtagcttctaaaagtgctccatcccatagtagttaagttttgagcagcatatttactcttaattgcattcaagttgtaagaaacaagatgtcctcttgagtcgctactgctagtgtacatagaagctgtaaaaataccatcattaacagtaataccttcaggaattaccccaacttgtcccattgcatcagcagcttgaccatagcctaagctgacaaaacgtggttggaacaaacgagtgcgcaaagtcatgccgttacctgaatagctatttgagctagtttctgaacgataaccgtgtgcctgattccaatttcttgatgatccctttgagccaccattccaagtatgaactgccttaggaccactcttaacagaagcacctgcactagtaattccttcatttgtatctgaacgaacagttacattaacgcttgcctttgccttaccatatgaataatctaccttagtagtgccggcacggcttgaactaacagagctatgtgaaacattaaccctatctggattaattgcagtaccttgtccatctgttgcatagttaattgcatccctagttggaaaactgtagttgctgttgtgaactaagctaacatcttgagctactgaaatttggtttctagcaaaaaagttttgacttacccaacctacattgcgtccatcgacaataatgtaccagaagttacctttcttggtagaaacatacttcttagattgaatttgaccatgcttaaagtacttggtatttgaaaatgcacctgatggtccttttttagatacattatgataaatagcgtaattaccattgccagcaatcttagtaactgccttgctgtagcttttggcatctaccttgctttgactaatggcaaaaacaccaccaactaatgcagcactggccacaaaagttaataacatctttttcccttttaacatccttattaatcctcccatatgaaaaaatcacgttcattttagcacaaatttatcaaatgaaacatctaattattaaaaaatttcctgaacaacaagactttgaaaacgcttctgttatataattaaaaagttcacataaatatataaatagtaatagggagaaattttatggtcgaatcacaaaataattccaaaaagatgatgtggaccaccctagcaatgatggccttctctaccgtgtggggctttggtaacgttgttaatgggtacgtctactttgacgggacaaaggttgtctttagctggatcgtcatgttccttctctactttgttccttatgccttaatggttggtgaacttggagctaccttcaagaatgctgaaggtggggtttcctcttgggtaaatgccactatgggcgcaaaatgggcctactacgcaggttggacctactgggcttgccacgttgtttatatttccagtaaaggtactggtggtttaagagcgatggcctggggtatcttcggaaatacaaaatggtatgatggcttacctaccgcttggacacaatttgctacattagtagtcttcttgcttttctgttgggttgcaagtcgtggtattccagtattgaaaggcctagcaacaattgctggttcttcaatgtttatcatgtcaatcttattcatcattatgatgtttgccgcaccagctattaatccttctgctggtttccacagtattgactttaactggaagaatttgatgccaaccttcaacgtaaaatactttacttctctttcaatcctagtatttgccgttggtggttgtgaaaagatctccccttatgttaataaggttaaggatccttccaaaaacttccctaaggctatgatggctttagcaatcatggttatggtatctgctattttaggtacttttgccatggcattaatgtttgaccctaaggtggttaatgccaaccttaacgaatacatctctaatggtgcctacatggcatttgacaagctgggcgaatattaccatgttggcggcttgttcatgtacatctattcatggtgtaacgtaatcggtcaattctcaacattagtaatcagtatcgatgcaccacttagaatgcttttgggtagtaaagaagctaaagaatttattccaaagggcttattaaaactcaacaagcatggtgcttacatcaacggtatctggatggttgttgtcctctctggtggcttaattgctattcaagctttagtaccaaatgctcaagctgttatggcacaattagttaaattaaattcaactactatgccacttcgttacctttgggtatttgcggcatatgttgctttaagaaaacagcagcaaaagttcaacactacttatcaaatgactaaacatcaaggcttagcctatactgccggtatttggtgttttgtagttactgctgcatgttgtatcttgggtatttactcaccagatccatttaccttattccttaatatcttgacgccaatcgtcttgattgcattaggtttaattttgccaggaattaagaaatatcaagaagcaaaggcaaaataaaatttaaatacagaattttaaaaaggaagcaatttcaaaagactgcttcctttttagtgtatatttttatttattagcccaagcatttaccaatgccttgtacttggcaacgctaattcctgcacctttactgcttcctaaatatgaatcagcatttccataaccagtattgcttacattggcaaatcccattactctataatttctgttaatcaaattcaagtagtgtcctgccattttatagccgttcgtgccctctacggccgcatcataagttgccgtccaagttggactatacttcgccggcttcaacgaatgattcttttttacatcataattccaacttttcttttcagagaaccaagtatcaaccggatctaaacccacactttgagtagcgatgttttccaaaccaatcgacttgaaataatgagtatgctttaagccaccacgtttttgatagtcagcatttaacattgaggctgctgtcaaaagtggtgacacctttaatgaccgaaccccttcacttctacgtgctctattgacactattcaaataaggcaatacagctttaatattcttagcactagttgcatcatcatttgaatgcaagtcaacgtattcattgtaccaacttgccttaggctttttacctaagcgacctgttttcaataatttcactgctgatctagcagagcttctttgccctttagtcaaagatttgtttttagatagatatgtcataaaatcaacggcatttttggctgccttaactggcttggaactcaataccgttaaagataaggtcatcatcacagctgatgcacctgcaattaaaaatcgttttttcattctttttctcccatattaatatatgtgaactacgatttaattgtagcacatacactaatggaagattttccttttaaattgcattatccatccatcttaacgtattgtcctttttcatctacaacacctttgaaatggtgcatgctgccatcttcggcctgaaattcacctaagtcaatttccccatagccctttgtagaatcagtaaccttaacatcatcaaaagtttctctgaaaaattgatgaacaattctactcttcaaccgtatatcctttgaatgctcaaaggctgcagacaacgtaaagccctcatctaattgttccttgataaaaacaattagatacaaggtcgctaaattatagcggcgcacaccactttgatcatctgaaatcggcttaatgtagcccttagtttcccaatagcgcaattgcctttgcgaaacaccggtcaatttactaacttcaccgattccaatttctaaattttgaaaaatgtcatgcataatttttttagatttcatcctgataccaccttacagtatagttatattttatatattgttgttatcttttgcaacacttgtgttaatttatctaacttatttgtaagattatttgacaatggaaaattttaagcctatagtttttatagttaacttttataagagaaaggaatattacatgaacaagcaaccaacggatattcatggaaaagcttataatcgaaacctactagttttagttttaattataggttctttctgtactgtattaaacggaacactgctttcaacagcgcttccttcaattatgcgttcatttaacatcagcaccgcaactgctgaatggctttcaacagcctttctgttagttaatggtgttatgatcccaatttctgcatggctaatcaatcgcttcggttcaagaaaaatgtatttgtcagccatgtcaatcttctttattggaacagtgatcgccgcaattgcacccaattttggcaccctgcttgctggaagaatcattcagggattaggcgtcggcgttactatgccacttttacaaacaatcatgctttccatcttcccagctaataaacgtggtgcagcaatgggaactgtcgggattgttattggcttagcaccggcaattggaccaacattatctggttggattgttgataacctttcttggcgttatcttttcagcatcattgccccaattgcgggaatagtaattatcttagctttctttttaattaaagatgttttaccaactaagaaagaaaaaattgatgtttggtcagtaacaacctctactctaggcttcggaagtctgttgtatggtttttcagaagctggtaacaaaggctggaccaatcccgagattttaggatttattggatttggaattatatttgtaatcctattcggtatccgccaattgaaaatggatgacccatttttggacattaccgtttttaaacactttgaattttcactggcagctgccttaagtggtatcaccaacttagcgatggtcggcattgaaatggttttaccattatatattcaaaatttgcgtggcgtttctgccttccattcaggtttaatgttactacctggtgcattgatgattggtattatgtcgccaattactggccgtttattcgacaaatatggtgcacgtaaaatggcaattactggtatgactttgttgaccattgggactattccattcgtctttttaactgaacaaagttcatacacgatgattatcattctttacgcaatcagaatggtcggtgtagctttggtaatgatgaatgttactacatctggtatgaattctttaccattaaacaagatttctcacggtactgctgttaacaacactttcagacaggtattaagttcaattggtactgcaattttggtatctgttttaactacaactaccaataataatatgcctggtaaaagtttacttcatgcactgccacttgaatacaagactagagcaatcagtgcaactttagacggttttcatgcttcatttgcaatgagtatcctcttctcattaatcgcattagttctttcattcttcttaaagaagggcaatcgagcacgtgaacatcaagaaaaggtggatggttaaatgatacttttaattctaatcgtagctgcaattatgtttatttactttaatatcatccctggaaaaaggcatacttctattgcatggctatcattaatcgtaacaattctttgtgttgttggcattgtagaacatgattataatcactggggaatgaaaactgaaacaacttcaagcactaatactctagtttccagtgctactcctcgcctgccaattttgctttatcagcctttaggtaatggaactgaaaaagtttacctttataaaactggtcagcttcaaaagaagccaaaatctattaaattacgcgtggtgctagttaaatcgttttagttaataaaaaagtccaatcttgttagactcgacttgtaaatagtaataatagaaaagagtctgatctgattgaactgccttaagcttaagcgttttagccaccatttacaagttagttttaaagatttagtgataatttgtcggcactggtatcgtttgtatgcaccggctgagtttactcatcggcgaaatattgatcaaattaaaactacggacagtctgattttggctttacttatctggcaagctaagacaggaattgaatcacaaagaagattctgtgaatgtttcaattgtttatcacactcacgttttaatcggcgttcacgtcagctattgcaattgatttatcagatacggcaagaaatgaataaaaaggttgacctgaatggacagttcttgatcattgacagctttccggtacctgtttgccaaccaattcgaaactatcgtgctaaaatttttcgcggttatgccaacattggttataaggccaccaagaaaatttacttctatggtttcaaagttcatgccattgttagcgatgacggttacattcttgattatgtcgtaacaaaggcatcagttcatgatgccagggagacagttgaactgatagaaaatacccatccatctaattactatcttcttggcgacgaaggctatttaggcaaagaactgcatcaacagctaaaacaaatgggttacgaactttggacaccatatcgtaaaaatatgacaggagctaaaaagcacaatgatcatcaattgatggctattcgcagaacaattgaaagcgacttttcgcttctgacctattacaatgccgagaacaatcgagcacgtagtctgataggctttcaaagccggttggaaattgcaattttagcttataatttggcttattgtctagaacgatttaactagcaccacgcgtattaaattagataaagtatcgacaaaagtaaaacgaagcagccaaccaaaagtaacgattaagactactcgctacacctatagcaatacctttaatcaaataatgtttggcgtctttggtcatgacaaggagttaaaacacagagaatatattttttctattccctccaactggaaagtaatgtcagttaacgatgccaagcagttgcaaaaacaaatgatgaaaaaacagcagtttttaaaacaaaaatcagcccaataaaataatgaagctcaaactttgatcatgatatgaaccccgaaattcggacatgaatttcggggtttttatttatggctaaattatctaaacatgacaaaattgatatttacaatagctagaaaaattaaattcattttaactcaaattttaccatatgatttaagttaacttaaatcacctttacaaacgcttatgaaatataatttaactaaatctaaatgtagaaaattatttttatcatactgcctatttcaattgcatcctatcattaaagtaatttttataagccaaatagccactaatcacggctccaaggccagtggcagaaagtaacataaatgtaatcataatctgatacttaattgcataaatgggatttacaccagcaaaaattaagccggacatcattcctggcaaatttactaatcctacagttttagccgaatctatcgtaggctgcatcgcagtcttaatgctccttcttaaaattggcatcgatgcagttttaatatcactacccaaagccaacttttctaaaacttgttgatgcagatcattaaagctatcattcaacgctttatagcataagccaactgccaccatttcatttccagcaatcatccccgtaatgggaatgacctgcatagggactggtttaattacgccagaaaaaatcagaattcctaatgtcacgtaagtccctaccgcttcggctattatcgaattccaaatattccgccccggattaggatcacgctgattagcattccaagatgcattaaaaattatcacaatagttgaaaccaaagttagccacaaggcattaacatgaaaaataaacttcaaaacgtagccgattacgactaactgaattatcgccctaatcacgctaattaaaatatccttggttagtcctaatttttctttcgcagaaattccaatggaaactaacaccagtgcaaaagctaatactaacgaccagttgctaactacaacatttttcattcgattattccgcctttttttactcttaaaatattacttgcttcatcaatttcactttgatcatgtgtaacttgaataattgtcacgcctttctcagaaacatccttaatcaaattatgtacaatatctttactttgattatcaagcccggtagttacttcatctaagagcaatatctttggtaaaaatattatgtttcgaattaacgcaactctttgcttttcaccacctgataaagcagtaatctttttatctaaaaaatcagcagagagatcaacttgattaagtaaatcagctatttgcttgtcatttacatctacttttctaatttcatacgggaaaatcaaattatctcttactgtttgcccaaataaagacggctgctgaaaacaatatgaaacttctctacgatattgaactggatttaaggagctaatgtttttttcttgatatagaatatcgcctgaattagcactaattaaatttgcaatcaatcgtaaaatcgtactttttcctgcacctgatgggccaattaaggttagaaaatcgcctttattaaccttaaatgatacatcttgcaatatttgttttttatctgcactatattggatatgttttaattctaatattttcattcttttgcctaactaaataactcatttttctaattatacaactaaaaaaataaaggaaatccaatattttcattgaatttcctttatttaaattaatatcgataatgattacttagtcaacttttgtttactttcaagtaattcagcacgttgagctaagttcatgtataacttgttgttgtaggttgcgataccttcaatttcacgaccagtgtggtattggtaagtatccttaacttcaccatcagttgcaatcttagcaattacgtcattgaatgcaaggtagaagttattgttcttggcatcataagtaaacccttgagtgtatgtgtttgctacaatgccacccttagttgcacctaccatagttggataccagttatcgcctttgcggttgaattcccagtattcagtttggtctttttctttattataaagagttgtgtaaagcttgtgatcatttacaacaacaccattattgaagtaacgaccgtctgaatcactaccgttccagcatttaatagtccaaatcttgttaatgcacatatcgctcttccgaatttggattaactcttcagacatattgctcttgtatgaaaccttattattgttatttagaacgtaaatgtatttatcagttgagcccattgcttgaccgtgaccaattggaatatatggactaactttaatgttcttaacgtaagaattgaacttcttttggctcatatcaagtaagtattgtccgttaaatgcattggttaaatggttaagattatatcctacaatatgaccattgctaatcagggtactacttaataaactagtgtacaaccagccatttgacatggtaattccttcaggaatatgacctacacggttaatatagtcatcatttttaatgtcacggtaaacacttaataaaactggttggaagaagcgagtagtgaaatctaattttccgctttcactatcataagcatgcttattcttatcaggagtaaaatcagtcttagttacatagttagcagaactgccgtagtaagtcttccaggatttcaaatcgccgttaaatggcttagcttggacgctatcagcatcagcaattccttccttagtactctttctgacagttaccttaacagttgcctttgctttaccatagctatatttaacattataggtacctggagttgagcaatcgattgcatcttctgaaatcttaatatctgctgtatcaattacagtacccatataattggttacataacttactgcatcagttggatcaaaatcgtagtgactattttgtactaaactgatagtctttggtacagcgatagcatctcttgtaaagtagttttggttaacataaccaactttacgaccatttacataaatacgccaataagttgcatcctttgtcttaattctctggtcagattgaatatgagcatattgataatcgctagcatcagcaatcttaccactaggtttaccattactaatctttttataaacaggataattcttattgctacctactttaaccattaagtcataagaagtacttgtttgagctggtcccttcttcgcactggaatcagtcttagcagtatctgtattactatcagtagttttagaattatctgcaaatactgcatttgtagaaccaattaacaaaccaacacccagtgctacagctgaagtagcagttaaaattttatttgaatacttcaaacctatcctccgtatcttatattttgcattttacttttatattataatacgcgtggtgctagttaaatcgttttagttaataaaaaagtccaatcttgttagactcaacttgtataataatagaaaagagcctgatctgattgaactgccttaagcttaagcgttttagccaccatttacaagttagttttaaagatttagtgataatttgtcggcactggtatcgtttgtatgcaccggctgagtttactcatcggcgaaatattgatcaaattaaaactacggacagtctgattttggctttacttatctggcaagctaagacaggaattgaatcacaaagaagattctgtgaatgtttcaattgtttatcacactcacgttttaatcgacgttcacgtcagctattgcaattgatttatcagatacggcaagaaatgaataaaaaggttgacctgaatggacatttcttgatcattgacagctttccggtacctgtttgccaaccaattcgcaactatcgtgctaaaatttttcgcggttatgccaacattggttataaggccaccaagaaaatttacttctatggtttcaaagttcatgccattgttagcgatgacggttacattcttgattatgtcgtaacaaaagcatcagttcatgatgccaaggagacagttgaactgctggaaaatgcccatccatctaattactatcttcttggcgacgaaggctatttaggcaaagaactgcatcaacagctaaaacaaatgggttatgaactttggacaccatatcgtaaaaatatgacaggagctaaaaagcacaatgatcatcaattgatggctattcgcagaacaattgaaagcgacttttcgcttctgacctattacaatgccgagaacaatcgagcacgtagtctgataggctttcaaagccggttggaaattgcaattttagcttataatttggcttattgtctagaaagatttaactagcaccacgcgtattataatatataaacactgttagctaaaatacatttttattaccattgttaccattgagcttctttatttgacactttcattacgaagtgatttaattagcactgtacttgaaagagtgctaattaatacgaaatcaattaggaggcaaatttatgctagtacctacagttattgaacaaactgctcgtggtgaacgtgcttatgacatttactcacgcttattaaaagacagaattatcatgcttagcggtgaaattaatgaccaaatggctaactcaatcatcgctcaattactcttccttgatgctcaagacaataccaaggatatttcactttatatcaactcaccaggtggtgtaatcacctccggcttagctatcatggataccatgaactttattaagtcagacgtatcaactattgcaattggtatggcagcttcaatggcttctatccttttgactagtggtaccaagggtaagcgtttcgcacttcctaactcaactgttttaattcaccaaccattaggtggtgctcaaggtcaacaaactgatatccaaattgcagctaacgaaattttgaagagccgtaagaagatcaacgaaattttgcacgaaactaccggtcaacctttggaaaagatccaaaaggatactgaacgtgacaactacttaactgctgaagaagccaaggaatatggtttgattgacgaaatcatggttaataagaagaagtaattaattattaaaaattattcacactctaaaaggagcttgcactcattgtgcaggctcctttttcttattctcttaaactctcagctaactcatgtagtttcttaaatcggtgattaactcctgacttcgaaatcggaccatccggaatttgattagctacttcctttaaagttaattctggatgcgccaatctaaaacgcgctaaaacttgcaatttctctggtagatcatctaagccgttttcttgttcaatcagctggatgtcttctacctgcttagctgaagctgaggctgtttttttcatattcgcggtatcacaattaaccaagcgattaaccgaatttcgcatatctcgcataatacgcaaatcttcaaagttaagcattgcattaagtgcacccactatatgcaaaaagtcgccaatttttgcggcttcttttaaataaacaatatagcctcttctacgtttagttgctttagcatttaaataaaaataattattcatcaacttacataaatcctcattatggtcctcataagttgaataaatctccaagtgataacgactcgtttctggattattgacactacctccggctagaaatgcaccgcgtaaataggacattgctccttcacgtgaagtcataattctctgcggaattcgcgttaccaaacctttttcaggatcccagatttgtaagttttctaggatttcttgtaccttctgattcaatcgtaccaaatattgattattttttttcaatttcatcttgcgcgagacaatcagcaatggctcaataccataagcaatcttaatcagcttaaaaattcgtcgagcaatcgcaggattttctgtagttatatctaggctaaattgatgatcgtgcaagtttaatacaccattcattcgcaaaaaagcagctaactctgctttggcatgctctggatgcacctcaagcgaagttagctcctttttgacttcactagcataactagccatcattttccttcattcttttacgtgacattgattcaaatgccagattaataatttcttttcctaccttttcaccatcatgaaataccaatccatgacgttgatcgataaagtcatcagtaatgacacggcagttttgctttcttaagccttcaaagtcattcttaacaggctcaagataagcatcataatcttctgggtgaaatttgctcatatcaattttggcaccattaaccagagcggtattgatataatttccacctaagtgatcgttaattacctgtacgtgttccgcatcactaaagtgatctgtctcaccacgctgagtcatgatattgcaaatataaataacctcggcgtcagtctcacgcactgcttcacctaaattagagatcattaagttaggtaaaattgaagtaaataaactacctggcccaagtacgactgcatcagcttgcataatcgaagccagtactggtaaaacagctctaggctcttcatccgaatcagtatcggtcacccagacacgcttaatccgcttatctttagatgtgatttcagtttcaccagactccgtagttccatccacgaattctgcgtttaaagtcaatggttcattggatgctggaaaaacatgaccatcaattttcatcatttttgacaaagattgaactgcatcaaagatattgccatgcatttcattcaatgccgcaataattaaattaccgattgcatgtcctgaaaaaaaggaatcggatgaatcaaatcgatactgaaaaatattcttttcttcctgaggtaagtcactaagtgataccaaaacattacggatatcaccaggtggaactacgttaataaagttacggattgaaccagatgaaccgccgtcatctgaaaccgttacgattgcagtaatttccgcgttttgatcttttaaggcattcaaaataactggtaaacccgtaccgccaccaattacgactacacggggacgtctgcctttaatcacgcgaacaatccttgtttctccatatggcacaggtgcgcacctactttctaatataacgactcacttcacggtgagtaatatcgactggatattttttagctaaatctcgtgccaactgttgggcaattgaaacactccggtgttgacccccagtacaaccaattgcaatggtcaacttttccttcccctctttgatatatccagggatagctgtttcaagcaaatcaagcaattttttataaaagacctgtgtttcttctttgttcatcacatagtcaaatacacgcttgtccagtcccgtaaatggtcttaattctgaaatataaaatgggttaggcaaaaaacgcacatccattacaatatctgcatcaattggcatcccatacttaaagccaaatgacatcacttcaattgaaaatggctgccgcttgcgatcactaaatgtattgattaatttttgctttaattccttagtcgacaagtttgacgtatcgataatataatttgatctatttttaattggcattaaaatacgacgttcttcttgaatgccatcaagcaagcgacctttgccattattggctaaaggcggaagacgccttgtttctttataacgagcaaccaagacatcatcggaagcatccaaaaataggatagtagcttgcacattgccattatcttcaagtgaattaacttcatccaataaatcgcgataaaatgtcttaactcgtaaatcaattactacggctaccttatgaaagtcattggaattattaattaaatcccaaaaactacctaataaagttggaggaagattatcgactacaaagtagcccatatcttctaagtcatgagcgaccacagttttacctgctccgctcatgcctgtgactattaataatttttttttctcatcagccatactgaaatcctcctctttacaaattatatcataccgggtgtgtcataattgtgcaaaaaaaagaagcctttcggcttaaatttttatcaaatattaacggtgcataaatgcaaccacaatttcattaatgccaaagactaataaccagaatgcaactaaccatactaagcttaaggctgcgattactggattaataattaagaagaaggcaataatcaaacttaaaatattcaaaatcaagttaaatacaaagtatccggttgaaaatgcacgtaagtgccatgaccaagcaatacctacaactgaatcaacaaagaaccagattgcaaataagtaagcgatagtcaaaccaccaatatcatatgagcaaatgaacaagataccgataatgatatctaatacacctgacacaattgctacccaactacgtgagaaaaattcacgaaagcgtgagtaagcagccaaccatacaataccttgaacgattgatacaatagcaaaaatcaagacaaatgcatgcaaccctttagctgggtgacgtaataacacgaacgcaactacgaccattaagataccggcaataaatgcgccccagtcaaagccgtgattatctctagaactagaaaaaatatccatttttattcctccttgcagactattttacacttattcaaggttaataaaaactattggctattgtcttctagcctatttttttgcttcttttgttagtttagtatcacgttctaagactggtttcaaatactgaccagtatagctttctttaactttcgctacttcttctggcgtaccggtagccacaatttgaccgccacgttcccctccttcaggacctaagtcgatcagccaatctgcatttttaattacatcaagattatgctcaataattaaaaccgtattgccttcatctaccaaccgctgcaaaacttctaataaacgcttgatatcatcggtatgcaaaccggtagttggttcatcaagaatatagaaatttttaccagtagaaagcttttgcaattcagcagctaatttcattctttgagcttcaccaccagataaagttgtagcggattgacctaatttcacatagcccaaacctacatcaacgatagtctggagtttacgctgaatcttaggaatattttcgaaaaacttagttgcttcattaatcgtcatatcaagcacttgagcaatattctttccccgataagttacttccaatgtttcagaattataacgagtgccgtgacaaacctcacatggtacatatacatcaggcaaaaagttcatttcaatcttgataattccatcaccatgacaggcttcacaacgtccacctttgacgttgaacgaaaatcttgctttagtataaccacgcaattttgcttcattagtttgagcaaataaggttctgatatcatcaaaaacactagtataagttgcaggattactacgtggtgttctaccaatagggctttgatcgatatcgatgattttttcaatattcttgtaacccttgattgacttatacttacctggcttagttgaattattgtttaatttttgggctaaagcgcgtttcaagatcatattaaccaaagtagatttaccagaacctgagacaccactgaccacaataaatttgcccaacggaaaatcaacattaatattctttaaattattttcttgagctccagtaattgtaatctttttaccattgcctttacgacgcttcaatggaaccggcacaaattttttaccagacaaatattgccccgttaaagaatcaggattctgctctacttctttaggagttccttgtgccataactttaccaccgtaaacaccggcaccaggtcccatatcaaccaaatagtcagcttgccgcattgtttcgtcatcgtgctctaccacaattaaagaattgcctaaatcacgcattctctttaaagaagcaatcagccgatcattatcacgttgatgcaaaccgatagatggttcatccaaaacatacataactcccgataagtttgagccaatttgagttgccaaccgaatacgctgagcttcaccaccagacaaggtattagctgatcgagaaagagttaaataatctaatcctacactatccaagaatgaaagacgatcgcgtacttcctttaaaatcggcttagcaatcatagtctcttgctcgcttaatttgacgtccttaaagaaatcaagtgctttatcaatagaaagctccgaagcttccgcgatatccttgcccatgactttcactgctaatgctttttcattcaaacgcttgccgtgacaagttgaacaagtaagttcagtcatatatttgcccatcacatcacgcataaacttggacattggtcgtttataacgccgctcaacattggccattactccttcaaatggttgaacggtatcattaacgccaaagtcaccagttacatggaatttcaccggcttagttgagccatgcagaataatgtcgcgttgacgtttagttagtttattaaaaggcttatccatcggaatttttaatgccgtgcaagcttgttccaacatttcagtatagtaattggaagtcttccatggagccagtgcaccttcagctaaagattttgttttgtccggaacaaccaaatcttcgtctactgctaacttcatccctaacccatcacaatcaaggcaggcaccaaatggtgcattaaaggagaacagtcttggttccatttcacccacagtaaagccacactttggacaagcataatactcagaaaagttaagcatttcaccaccaattacatcaacattcatgtagccatctgacaaacgaagtgcagcttcaatagaatcaaataagcgagacttaatgctatccttaacaatcaaacggtcaacgacaatatcgattgagtgacgcttgttcttagctaattcaaaatcctcaccaatttcgtgcatctcaccatcaacaattacacgaacatatcctgcacgttgcactcgcttaaatacttccttgtgttctccacgcttagcacgaataactggcgctaaaatttgaattttcgttctttctggtaaagccatcactcggtcaaccatctgatcaactgattgtcgttgaatcagcgtcccatcattaggacaaattggatggcctactctggcccaaagcaaacgtaaataatcattaatctcagtgacggtcccaactgttgaccgtggattatgtgacgttgttttttgatcaattgaaattgctggatttaaaccatcaattgaatccacatctggtttatccatttgccccaaaaactgtctagcataactagaaagtgattgcacataacgtctacgcccttctgcataaagcgtatcaaaggctaaagaacttttacctgaaccagataagccagtaataactactaacttatccttaggaatagttaaattaatgtcttttaaattatgttcacgtgctccgcgaataacgatcttatcatttgccattaaaattctttccttttcttgatgatttttgcaattccataattgcatcccgcaagttagcagcttcttcaaagtcaagcttcttagctgcttcttgcatttgctcttgcaagttgctaatcattgtcttcttttgcttagccgtcaattcatcaaaattaagatctgcaaaactatcagatttttcttctttttcactcgacggtttagtaatcgaaattacgtcttgaatcggcttaatgattgtcttaggcgttatgccatgctctttgttaaattccatctgaattttacgccgacgcttggtagctttaatcgctgctctcatggaatcagtaatcgtatcagcatacatgattacttcaccattggcattacgggcggtccgtcccatagtctgaaccagcggccgatatgctctcaagaagccttccttatctgcatccagaattgctaccagtgaaacttccggtacatcgattccttcccgcaacaggttaattccaattaagacatcgaacttacctaaccgtaagtcacgcaaaatttgcattctttccagcgtcttaatatcagagtgcaaataacgtactttaattcctaagtccttcaaataatcggttaagtcttccgccatttttttggtcaaagtagtaacaaagactcgttcatgacggtcaatccgtttattaatttcgccaactaaatcatcaatttgaccctcaattggccttacttcaatcttgggatcaagcaatccggttggtcgaataatttgttcaaccttatgatctgttcgttcaagttcataatcacctggggtagctgagacatacaaaatttgattaacatgcttttcaaattcggatagctttaatggacggttatcaagtgcagatggcaaacggaaaccatagtcaatcaaggtttgcttacgattacggtcaccattgtacattgctctaatttcaggcatagtagcatgtgattcgtcaattaaaattaagaaatcatctgggaagaagtccaacaaagtatacggtggctctcctgcttttcgtccttccatatgccttgaatagttttcgattccgttggtatagccaacttcacccatcatttccatatcataggtagtacgttgcttgattctttcagcttcaagcaatttgccttcgccttcgaactttttaacctgcaatttcatctctttagaaattgctcccaaagctcgccgcaattgctcgtcattggtcataaagtgcgtagctgggaaaagcgaaatactctcacgctcaccgatcacctcaccggttaacgaatcaacttcaacaatgcgatcaatttcatcaccaaagaattcaattcgataagcatgattagaattgccggctggaaagacctcaactacatccccgcggacccgaaaacgaccgcgttgaaagtcaatatcattacgatcatattgaatatttaccaaatcacgcaacaaggtattacggtcatattcttcgccttcatggatcatcaagacactgcgcgcatactctttaggatcacccaaaccatagatacaagaaaccgaagcaacaactactacgtcattacgctccattaaagctgaggtagtagcatgccgcaactgatcaatttcatcattgattgccgaatccttttcaatataagtgtctgattgtggaacgtaagcttctggctgataataatcatagtatgaaacaaaatattcaactgcattattaggaaagaaacttttaaactcaccatatagctgccctaccaaggtcttattatgcgtaataactaatgtaggcttattcagcttagcaataatattggccatggtgaaagttttcccagtaccagttgcaccttccagaatctgttctttatatccttttttaaatccagcagtcagtttatcaatagcttgctcttgatcaccggctggtttaaactttgatactaattcaaatttgcgatttttttgtcgtttaatcataaaaaactcctcaagaaaaaagttggacaagcatagtccaactttttaattagtatctatattttactaccgcgaacgtgctttcgcacgaaaaatgcttaattatttaagtaaatctgctaaagccttttgataatcttcagctgccttttctgcagtggcaatgtcttttttgtttacaccaacataggccttaattactggttcagtacctgatgggcgaagtgctacccaggtttcatcatctaagaagtacttcaacacattagattctgggaacccttctaatggtgtctttttgccattttcaatagtttctttttgcaagaaatcttgaatcttaagcactttactaccgccgatttcagttaagtgctcattacgcaacttgctcattaattcggccatcttcttttgaccaccaatacctggcatttcaattgcacgggtaatttcataagcaacgccatacttttgccaaatttcttgcaaaccatcaaagacagtcatcccacgtgaagcatagtatgaagcaacttcggcaaacatcaatgcaccctgcatggcatccttatcacgagcaaatggtttaaacaaatagccatagctttcttcaaagcccatcaagaacttagcatcaccagctttattcatccggtcaacttcttcaccaatgtacttaaagcccgtcaaaacatgcttagtcttaataccaaagtcctctgcaatcttaaatggcaaagcactagaaacaactgaagtaacgatctcataatcaggggttaattgaccattttccttcatatgagccaataggtagtaagccatcaaagtagcaatttggttaccagtcaaaacttggaaatcaccatcagtttttctaactgctgcacccattctatcagcatccgggtcagtagcaataatgacattagcatttacctcatttgccaacttaaaaccaggttcaaaaacatcacggtattctggattaggcttaattgtggttggaaattctggatcaatgattgattgacttggcacaggaatcacattatcaaagccgccttgtctgaaagcacgatcataaagcatcttgcctgtaccatgaagtggagtataaatgatctttaacttgtcagcgttggccttaaccatctctggatcaacagttacttgcttcaattcattcaagtaatcttcatcaacatcttcacctattaactgcaaggtgccattagcacgcaattcttttactggtgcagccttgacagcaaaaatatcagttactttttgagcataagcaaaaagtcgatctgcattatctggtgccatttgtgcaccatcttcaccgtaaactttatagccattgtattgcttagcattgtgtgaagcagtgatattaattccagcgaaagtatgcaaatgacgtactgcatatgaaagttctggtgtcggtcttaaatcatcaaataagtaaacatgaattccgtgtgcacctaaaactctggcagcatgttctgcaaactctcttgagtgatatcttgaatcaaaggaaatagctaccccacgctttttagcatcagcaccattttcttcaattaaacgagctaagccttcagttactcgacctacagtaaacaagttaatccggttggtaccgggttcaagacgaccacgcatccccgcagtaccaaaattaatatcctgtccaaaggcatcttcgatccatttttcatccttgcccaaagtatttaattgatcttttaaataatctggtaaattagtagctttttgccattctgtataaatttctttagcgtccatcaatgtcctctattcattaaaagttggatttctaaagcgctttcaaactgttaacaattttctattatttgctattaattataaaacttattagtcattaatttaagctttagacaaaaaaagacatgtccaatacgaacatgtcttaatgaaaaaacgaataaatttaatttttcttgtcttgtaagtcttggtagtaattatatgcagcttgaccagctacactaccttcaccaactgcattagcaatttggcgtaaatctttttgacgaacatcacctaaagcaaagataccaggcaccttagtttccatatgatcatcagttacaatccaaccatggtcatccaagataccaagatccttaaaaggttcagtttgtggtaaaacacccacgtaaataaagacaccagcaactggaatttctttttcggcaccagtttccttatcgcggtacttaacccctgtgactttcatgtcatcgcctaagatttcttcagtttgtgcattccaaatgaaatgcatcttcttgtttgcaaatgcacgcttttgcaaagttggttgtgctcgcaattgatcacggcggtgaataactgtaacgctcttagctaattgtgaaagataaattccttcttcaattgctgaatcaccaccaccgatgacagctacatcttcatctttaaagaaagcggcatcgcagacggcacaatatgaaacacctttgcctgaatattcttcttctccaggcacattcaaatgcttatgatctgaacctgtagcaataattacgatcggtgcacgatactcattgccatcatcagttttaactaacttatcctcgccatcgagttcaacactttgtacgttgccatacttataatctggttcaaacttcatcattgtgtcgtacatcttttgactaagttctggacctttgatttcagaaaaaccaggataattgtcgatagcatcagtattgttcatttgaccgccatagggaccgcgatcaagaacaagaatctttaagttagcacgcgcagcatataagccagcagtcatcccaccaggacctgcaccaataataattacgtcgtatttatcagccataatctatccttctttctacttacttttgataagcaaataatacaatagatttaacttcttgccaactattttgcttatcttttataaacgaatttcaggctttggttctctacccatcattttcttaatttctgtatcaacatcagcatcttcataaagaacacggtagattgcctctgaaattggcatatcaatgcccttttcttcacataattcgtgaacagctttaacagtagtagcgccttcgacaacttgtcccatatttttcaaaacgtaatctaaagtcttgccttcgccgatttgtttaccagcacgccaattacgtgagtttactgaagtacaagttacaattaagtcaccaatacctgacaagcctgagaaggtcattggcttagcaccaaagtattgcacacccaaacgagtgatttctgctaaacctctagtcatcaaggcagctttggcgtcatcaccatatccttggcctactaaaatacctgcagcaatcgcaattacgttcttaacggcaccaccaacttctacacctactaaatcatcgttagtgtagaaacgaacgtagtcattggagaacaattcttgtacccgcttagcattttcttcattagttgatgcacatgcaatcgcggttaaatctttttgagcaacattttctgcgtgactaggacctgaaattgcaacaatcttatcttcatcatctggataaatttcttcagttaaaatttcagaaataagcttcttactgcctggttcaatccctttagttgcagtaactaacagtggcttagcacccgtcttatctaaaaccttgcgtacgtttttagcaacgattctaactgccttagttggcaaaacaaataaaacaagttctgccccatcaagagctgcttccaaatcaccagtagccttggtattctcatttaatttccaatccttcatatagtggctattggtgtggtgagcgttaatttcttcattaacactatcaatgttaccgtaaagagttacatcgttaccattatcggctaacattgaacccaatactgaaccccatgaaccattacctaaaactgcaatctttgtcattttttctctcaaactttctaattaaaatcttttattaattctaatctcttgaatacgggtattttaatccactaccatccaaataccattttggattaacgactttccgccgataaatccataaaataattgtagcaataaagaggattaaacttaatgcctgtgatactcgtattataccaaaaatatacagactatctgtcctcattccttcaacgaagaaccttactacactataccaaagaagataggtcatgaaaacttctccctgcttgaagagatgttttttatgacgcaaggatagaattaagattaagccaatcaaattaaaaaatgattcgtacaaaaaagttggttgataatacgtcccgcctattttcatttgctcaataataaattgtggtaagtgtaagctttgtaaaaaatgaagagtagttggtgcgccgtgcgcctcttgattaacaaaattaccccagcgtccccaaatctgagctgccatgactccaggagcaatgatatccagcattaaaaatggaggtagcattcgtttataacagaaaatcaacagcacaattaagccggcaattaaaccaccataaatcgcaatcccaccattccaaatcgcaataatttgctcgggatgctgtgaataataaccccattcaaaaatcacataataaatacgtgcgccaacataccctaacggtactgcccacaatagcaaatcgacaaaatcatctggaataatttgacgtttttttccttcgttaatcgccatccagcaagctaacataatggctactgccataatgatgccataccatttgacacttaaattccctaaatgaaaggccaccggattaattactaaattagtcattatgcggcaccttattcgtatcttcttttgagtgctctgaaatcagactagtcaaattattatcaaaagtttgagttgcatcatagcccatcttcttagctctgaagttcatcgctgcaacttcaataataatttcaatattgcgtccaaccttaactggaatattaacctgtggaattggtacattgcagatttcacgcgtattttcttgaaaacctaggcgatcataattagcttttggatcccaattaaccaaattaattaccagttggatttctgttctattttttacggcaccggcaccaaataaattcatcacatcaataatgccaattcctctgatctccattaagtgctttaagatctttggtgcttcacccacaacggtattatggtctttttgaaaagcatctactcgatcatccgcaattaatctgtgtcctctttgaactaatcccaaagcagtttcagacttaccaacaccagatgcaccagttaacagcacacccatccctttgatttcaaccaaaacaccatgaatgctggttcttttggctaaacgagcacgcaagtattcagttaaaatactggatatgtaggtagttgactctcttgtacgcaaaattgggattttgtgttcctctgctgccgtagttaattcttccggtacaggcaaagagcgagaaatcaaaaaacacggtgtagccttagtacacattttgttaaagacatgcattctaatatcatggtccaagcgtgccgcatatgaaatttctgtccgacccaataattgaattcgttgcgcaggataaaaatcaaaataaccagttaattctaatccagggcgataaatatcagaaacataaatttcttcatctttgatatattcctgtccttggtaaacttcaaggatactctgattgtcctggatcaatttgcttaatctaacttcatcagccatattaggcctcctaactatttatcaatatctttagtggtgacatttctagctttttttcttggtctaggaccagaagtactagtagccttaaaccactcacgataacttccactacttggcatattatcttgatttttccttccagtaaaccgataaataagccaaatgattaaaatcgcaattacagctactggtaaaagtaaaataaatgccttaaatagaacaaacaataaacttaaaataattagcgctactaaaacaagcgttacaatttccattaaactcattttttaacctaatctggattctcttgactaagcaaccactgtaaataggaataaataaacggttgcaattttccgtccattactccttgagcgtcagctgtttcatgacctgtccgcaaatctttcactaggttgtaaggatggaaaacatatgacctaatttgtgatccccagccaatctccttttgatcgcctttcagagcctgcttttgcttacgctttttttcttcttctaagtgaaaaagctttgctcttaattcattcatcgcagtttcacggttttgcaattgtgaacgctgtgcctgagacgtagtcacaattcctgttggtaagtgcgtaattctaacggcactagaagttttattaatatgctgcccaccagcaccactagagcggtaaacatcaacccgtaaatccttaggatcaatatcaatttgaatactgtcatcaacttctggaatcacttctacagaagcaaatgatgtatgccgtcttttagccgcatcaaatggcgaaattctaaccaaacgatggacaccattttctgatttaagcattccgtaagcatttttacctacaattcgcgcactaacgctcttcaacccagcttcttcaccaggctcataatcgttgatttcaaatttaaaaccagctgtatcacaataacgttgatacattcttagaagcatctgtccccagtccatcgcttctgtaccgccagcaccagggtgaatttccatcaaagcattatggctatcatacttacccgacaagagcaggtctaactcataattatgaaaatcttcttgcagcgtagctagatccgcttcaacttctttttgcaagtcaggatctggttcttcacgcaaaagttcaaccgcagtagtttcgtcttcgtagctagtttgcaattttaaaaatgaatcacgtttttcctttaatcggttggtttcactaattaatttttgcgctttttcctggttattccaaaaatcaggctgcgccatcttgttttcattaatttcgatgctttcatcaatcgcatctaagtcaaagagaccccctaaagtgatttagacgtttttttagttcatctaacacactttgaatttcactaatttccatttttacctaccatcttttattttattgcaaaaaaagggaagctcttaactcccctttttctttattaacgactaagattttgtctaatttcagccttcatgaacaaacgagttacatcaaattcaatatttgaaatcatttcttcaaacattctgtaaccagaatcttgatattcaactaatgggttcaattgaccgtatccacgaagaccaattgattgacgcaactgatccattgcatcaatatgatcagtccaacgatcatcaaccacacgcaagataactaccttttcaaattcaagcatttggctaggatcgcctaaggccttttccttatcttcgaagttttgctcaacaatgtcataaagcttcttcttcaaatcttcaacactaatagtcttgaagtcaattgagtcagttaccttgtctgaagtcaaacttgaggaaatgaaatcgcgtaatgagtcaagacgccattccttgcgttcaccttgagtaaacattgctacttggtgatcaattgttctgtgaatcattggaattaaaacattcttcaatgacttatcagcttcaatgacctgcattctttcgccgtagataatttcacgttgaatacgcataacatcatcgtattgcaaagtttgcttacgagtatcatagttattaccttcaacacgtttttgagcagattcaacttggcgagtaatcaagcgactttcgataaccttatcatcatcattatctgataaacgatccaagaagtccttaactcgatcaccaccaaaacgcttcatcaaatcatcttcaagcgacaagtagaatctggtgtaacctgggtcaccctgacgaccagaacgaccacgaagctggttatcaatacgacgtgattcgtgacgttcagtaccaataactgccagtccaccaagttctttaacaccaggcccaagcttaatatcagtaccacgaccggccatgttagtagcgatagttacggcaccacgttgaccagcgttcatgatgatttgagcttccttagcgtggttcttagcgttcaaaactgcgtgaggaatacctgctttatcaagcatcttactcaaacgttctgaactttcaatggcaacagtaccaaccaaaacaggttgaccattagcgtgacgcttcttaatttcttcaactacagcgtggaacttagagtccaaagttggatacaaaatgtctggcatgtcttttctggcaattggacggttagtaggaatcgtgattacctgcatgttgtaaatttcacggaattcttcctcttcagtcttagcagtaccagtcatacctgacaacttcttgtacattctgaagaagttctggtaggtaatagtagcttgcgttcttgattcttcttgaatcttaacgccttccttagcttcaatagcttggtgcaagccatctgagtaacgacggccttccattacacgaccagtgaatgagtcaacgatcaaaacttcgccatcttgaacaacgtagtcgatatccttaagcatgatgtagttggcacgaagagcttggtcaatgtggtgaaccaacttttggttttcaacatcgtacaagttctttaggccaaagtgttgacaagccttttcaataccagttctggtaagtgaaatagtcttagttggccagtcaatcttgtaatcgccgtgatcttcatcatcgtcggcatcatcatcgctcttgtcttcagtcaaagtcttaacaaagcggtcagcacggatgtaatcactgtttgcttgttcagcttcaccagaaataatcaaaggagttctagcttcatcgattaagatagagtcaacttcgtcgatgatagcgtagttcaatggacgttgtaccatttgttccttgtaaacaaccatgttgtcacgcaaatagtcaaagccaagttctgagttagttgagtaagtaacatcacagttgtaagctgcacgcttttcgtctggtgacattgagttcaagttcaaaccaacagttaagccaagccacttgtaaagttgacccatttcttcttcgtcacgacttgaaaggtattcgttaacagtaacaacgtgtacacccttgccttcaagtgcgttcaagtatactggcatggttgctgtcaaagtcttaccttcaccagtcatcatttcggcgatgttaccgtagtgaagtgcaataccacccaaaatttgtacgtggaatgggtaaagtcctaatacacgcttagcaccttcacgagcaactgcgaatgcttctggtaaaagatcatccaaactttcgcccttctttaaacggtcacgaaattctggtgtctttgcttgcaattgttcatcagatagcttgctcatttcatctgcatgagcttctaccttagctgcgattttttcaaatttcttaagttctcttttatcgtcgttatatagtttctttaaaatatttaccattaaatcggtccttatatgtcgtaaagtctaaaaatacagaataattttaacatgtttatcagcaaaataaaaatattctaaacaaaaaaccccacgctcaaacaaacgcgaggttttgaattaacgagtattttaactcaattattcgttagtttcaattaagccgtaacgaccatcgtttctacggtaaacaacgctagtgccgttagtttctgcatcttcaaaaacgaagaagtcatgttccaacatgtccatttgtaaaatagcttcttctggatccattggctttaagcttacacgcttgttacgaacaatatcaaattcgctaggcttcttttcttcttcttcaggttgttctacaaagaaatcttgtaatcccttttcacgactctttctatttacacgagtcttgtactttctaatttgacgttcgagtttttcagaaacgaagtcaatgctacgatacatatcatccgtggtttcttcggctctcaaaactaagtatggtaaaggaatagtaacttcaactttagctgagtgatcacggtatactctcaagtttacgtgtgcaatcacatcttgattcaattcgaagtacttctctaacttgtttaaccgcttttctacataacttctcaaagcatcagttacttcaatattttctccacgaacattgtactttaacatataagattctcctttcaccgctatgcggtttttctttacaaatttattataccaaaaaatgtaagcgtttcataacaaatctaatgacaaattgaaaagctttcaattttcatttcgggaaaaccctgctgtaaacggtcccgcgcgtgatatagcgtgcgcccggtcgtgtaaatatcatccaaaattaatacttttcctgaaactatattttccttgattttaatatttttatcaatcaaaaagctttgaggcgttttaagccgctcctctttgtttttctcaccttgggcatgactacccgattgtttaatcagaagcggtgtcagcggcaaaatatcagcataaatagcaaaaattgtatcaaactgtcgtcttgattgatgttcaggtgaagtgggcacgggcacataaaagtcatagttagttttacacaaatagtcataacacaaatcttgcaatacttcccgcaaaacataatctccacgccgcttatacgcaaccatcaagtcatgaaaagcagaattataacgatataaagcatgattatgcagaatattttcgccataaatggcttgccaatttcgacaatcgctacacataaagccttgacctagttccttatcacagccagagcagcgattgtctgctaacttttcaaattgttttaaacattgcaagcaaattttactttttcgcgctgttttaaaagaaaaaagttgtgcaaattgtaccggtggagtaaactcctgctcacataataaacaagttctcatctattcatccccttgatctgcttaatactctgtcgaatattcttggtataacgatgataacaatacaaaactaagcccgtttggtcatcgtgagcccgaccaactcgacctgcaatttgcaccaaactagcagcggtataaattgcatcatctgctgcaataataattacccaaacatttttaaaagttacaccacgctctaaaattgtggttgtcaacaataagtcatatttacgatcacgaaaagcctgtactttttctaatcgttgcggatcttgtgcatgaacaccggccaatttaattttattttgcaactttttccgcaaagcttcttgataaagcggaatttcttcaatccgtggtacaaacaaaagcaaaggatgaccactttgaatgacttttttaatctcctgcattaatttaggatgaatttgtcccttccgcaaaaacggcctgataaaaagcctttctcttggtacaggcaataatccaccatgaaaacgccgatttaagcgcaaaatttctaacttccctgttttagcttccaaaagcaaatcgttcgttggcgttgcggttaaatacattcgagtcccagttgttttaaccgcatttttggccgcaaaatgtagttgcggattacctacataaggaaaagagtctacctcatcaattaccaataaatcaaaggcacgataaaacttcattaattggtgtgtagtacaaattgtcaactgctctagccctatttccttaaattcacggccatgatacttaccgatctcaacttgggcaaacgctgccgaaaatcttggaaacagctcatttaccacatcaattcttggtgtagcaatacaagcgcgctgtccttttttcatacatcgagcaatcaactgaaacaacatctcagttttacccgccccagttacagcatgaaccaatgtattttttctttgttcaaaattttgtactaatttatccgaaatattctgctgcaatggggttagtttaccttgccagcttaatcccccgtttttaacatgagaaaaagtattattactgtcttttctaataagccaatcgccctcatttgcacgtcccaagccaatacaaccacgacaataatatttaccattaggcagtcgactattaacttggctgccacagcgattgcatttacctttttcaattactggaattttacggcatccctcaaatgtgctagaatcctcttgactaacaatccattgacgacctgataatagagtcaaatcttccatatttttacctccctattatctattacgcaaaaagaggcgattattttgtcagaaaaggaaaattttttaactattaaagaaaacggcaccggtgaattaattatcaaaaagagcagattcattgccaatattgcccgcaccactactactgatgcggcaaatgattttattcaaaaaatctctaaaaaatatcgcgatgcttcgcacaatacctttgcctacacgatcggcttaaatgacgaccaggtcaaagaaagcgataatggtgagccatcaggtacggctggtgttcctgaattaaaagcattgcaattaatgaatttaaaaaacgttacagtcgtagtaacccgttattttggtggaatcaaattaggagcaggcggtttaattcgtgcctattccaatagtgtcaccaatgttgttgaaaaagtcggcgtcattaaacgcgttttacaacaagaattaatttttagcgtaccctataaccgcttcgatgaagttgatcattacctaaaacagcaaaaaatttttattgccaataccgaatacggtgtggatgttaaaattcatatttttgttaacgatgaccaacaagctaaacctaaggaagacctaactaatttattggccggacaggttacctttactaatggtgaaaaacgctataatgaaattcctgttgaagctaataattatcatgaacaataaaaagagcatttggatatttccaaatgcttttttgctacttattattttttttactcttcaattgatctggtttttcgtctcctaagtgccaaacttcaattgttggatcagttttactcttttgattaataattttctgaattacatgcatcaaaggatggtatttttcacccaataaaccaattgattccacaaaatactctaaggcaatcagcaagcctaagatcagaagccaagtgccccaagttggcgaaagcaggaataataaagaaataaatgagaaaaccaatgataatgcgtaaatagtcaataccgtctgtcggtgcgttaaccccattcgcatcagctggtgatgtaaatgatgcttgtctgcttctgaaattggctttttgtttagctttctccgaatcattgcataaacggtgtcagcaataggcactcccaaaatgataattgggaccaacaatgaaataaaagttacattctttaaccccttcagagataaaacggcgatcataaaaccaatataaagtgcacccgtatcacccaagaaaatttttgctggatggaaattatatggtaaaaagcccaataaacaggcagctaacataaaacaagcaattgggacatatagctgatgagtgtgcaagaagaaataacctacgatccccatggtagtcagagagatcattgaaaccccatcagctagcccatcaagtccatcaatcaagttaactgcattagttaaagctaagatccaaaaaatagtaattgggaaactccaccaacctagatttacttcatgtgcgatgaatggcacctttaacacattcattctgattccagctaaaaagtagataatcaatgaagcgataaaaatcccaaacattttttgtctaggttttaactccaaaatatcgtcgatcaatcccgtcaaaacaattacgcttgaagcgagtaaaatcgaaaaaatttcatgagtcggaaattgctcacgcaacagaacaaaagtaccgatattaaaagtaacaaaaatccccagtccaccaatcgttggcattggtttcttattaactcgccgggcattaggattatcaacagctcctaagacaaaggcaagccgtcgaataaacggtgtaattgccgctgaaataattactaataagaataattcaacaataattttaaacatatttggctactttccttatttacttgttctaattatacaagtagtcagtattttgcacaaatagcaaaaaagtttggaaaaattatcttccaaactttttaatttatttagcgatcgccacaactcttttttcacggataacggtaatcttaatattacctggataatcaagttctttttcaacctgattacgaatatcacgtgccaaaataactgtccgatcatctgaaatttcgtcaggttcaaccatcacacgaacttcacgtcccgcttgaattgcataagcctgcttaacgccttggtagctcttagcaatcttttccaattcggtcaaacgtctaatataattttccaaactctcgcttcttgcaccaggacgagcactagaaatcgtatctgctgcaacaacaagttcagcaataaacgacaacttaggcacatcgccgtggtgtgcagcaatcgcatttactacaacatctggttcatgatatttacgagttagttcaaccccaatttctacatgggaaccttcaatatcatgatcgatggctttaccaatatcgtgtaataaccccgcgcgaactgctaatttttcatccaagcctaattctgcagccatcgtgcctgctagcttaccaacttcaattgaatgtgacaaaacattttgtccataagaagtacgatatttaagacgacctagcgtcttaactaattcaggattcatccggtgaattcccagctccatcaaagcactttcacctgcttcatagatgtcatcgttaacttcttttctggccttatcgaccatttcttcaattctagctgggtgaatgcggccatccttgattaagcgttccatcgctcttttggcaatttcacgtctaattggatcaaaaccactcaaggtaacaacctttggcgtatcatcaataattagatctattccagtcaaagcttcaaatgaacggatattgcgtccttcacgaccaataatccgtcccttcatctcttcatttggtagatcaacaacagatacagttgtttcggcaactgtatctgccgcgctactttgaatagcatccacaatgacctgattagcataatgatcagctttagcttttacttcttcgttactatttctgatcatctcggctcgttctttgactagttcatcagataattgactaagcacaatcttcttggcttcttcctcatccaacttagctacgtcataaagcttttgccgtctagtttctactaattcttcagcctcagttaattttgcctttaagctagcatactgctgctttaattggtcttccttttgcgtgagtccactttcacgttcatctaataaagaattcttatgatctaaggtatcttcacgttgttgtaaacgatttttctcccgagctaaattatctttcttggaatttaactcatcctcggtcttttgcctaaaatcacgaatttgttcttgagcttcaagaattttttcttttttagtattttctgcactttgcttaacagccgctgctgcttgcttttgtgcattaacttcagcttgtgctgcagcaacctgtgccttagcatcagctaaaatgtggtcagcatcattctgggcattttgagctttttgttcccaagaatgcttgcgaattgcataaccaaccactgaacccaccaagaatgaaacaatggcagttgcgacgggaatcataattgttaacatattattcatgattactatcgccttttttagaattattcacacaacttttatgataaagaacctatctgttcatgtcaattaaatcaaaaaaccttggaaaataaatccagggtttttgacataattatttagcttgttcagactttttatctgtagcagcttctttttctgtcttggcttcttcgcgcttctccttgatcttttctggatcttcacgatcagcaattgacttttcatcaatcccgtaagcttgacgcacttgcttttggatatcttgataaatatctggatgctcttctagatacttcttagcattctcacgtccctgaccaattcgatcactcttgtaagagtaccaagaacctgctttatcgataatgtccttatcagcagccatgtccagtaattcaccactttgtgaaattcccttaccgtacataatgtctacttctgccaccttaaatggtggagcaaccttgttcttaacaactttaattttaactctgttaccaagaacatctcctgattgcttaatctgttcagctcttcttacttccaatctaatagttgagtaaaacttaagagcacgaccacctggggtagtttcaggattaccaaacattaccccaactttttcacgaatctggttaataaagatggcaatagttttggttttagaaatattacctgataacttacgcaaagcttgactcattaatctcgcttgtaaaccaacatgggcatctcccatctcgccttcaatttctgctcgtggtactaaggcagcaacagagtcgactactacaatgtcaattgccccactggaaatcaaagtatcagcgatttgcaaaccttcttcaccagtattaggttgtgacaaaattagtgaatcaatatctacacctaaagcttcagcgtaagcaggatccattgcattttcggcatcaatatatgctgcagtaccaccacgcttttgcacctcagctacagcatgaagggctaccgtagtcttaccagatgattctgggccataaacttcaataatacgaccacgaggatatccacctacaccgatagcagcatctaaagctaatgaacctgttggcactgttgaaatttgcgtatcagctttttcgcccatccgcattacagcacccttaccgaaattcttttcgatttttttaagcgctgcatctaaagcagcctgtttttcgtctttggccattaatgtcctcctatttttcgtacctaataattatactttgaccgccgtccaatttgcaagagaaatgcaaacgaacgttcaaaggattttttaccctctattatttattacgctaaaaatcgccattatttttttacaaaataaaaaaagaagcaaatgcttctttttaatcattcttgacttaatactattttacattgagcccttgaatacgccccatgattggtggaagtaatcgtaacctgagtaaatagtaaagatcaacgcaaggtaaagtaagatagtaccaatgtggaagaagtcaccaatcaataagaaaatgattgataacatttggcaagtagtcttaattttaccaggcatctttgctgctaaaacttgtccttcattttctgctaagatcaaacgcaaaccagtaacagccaattcacgacaaacgatgatagctactacccatgctggagcaagtttcaattcaactaagaaaatgaaagcagtcatagttaacatcttatcagctaatggatcagcaaacttaccaaaattggttaccatattacgtgaacgcgcaatgtgaccgtcaaaccaatcagtagccgaagcaacagcaaaaacgatagcagcaataacacgactccaaacaacagttgagcctgctgcttgaacactagcattcccaccaaaaatgatgattaacataaatactggaatcaaaaagattctaaaaacagtaagtttattaggtaaattcattctaacactcctagattttaattgttgttattatttccaccatcattgccattgttagtgtctgctgatgattgagtagtagatgattgttgagtttgactactttgttgggtttgttggctactttgagtagtagtagatgattgttgacgactgctttgacgagtagcactgctttgagtagttgtacggctttgggtagaactactattggttgtattgttattagtagagcccgtattattagaactactattattttgactagtagttcccttagccttaccaatcaacaaagtaattgtcctgtacgcattgtttgctgtatatgggattttcttacctgcaatagtgattgaagtaccattatcgttgcctaaagtaatcactactctctctgcattgcttggcaaagtcatagtgtgcttttgattagcaagtaaagttgattgccagctattagcattaccattgacttgtacacccgctgaaatattttggttttcaccagcacgcacaactaggcgacggtttttattcaagccagtaactcggtactcattgtcactaaccttagtaaccttaactttattgactactacttttttagctttcttagaagatgacgatgatgacttttgtgatgaaacagttacatcattattatcagcttggttcttttgaccacctgaagaaagacgagcatacaaaacgtacactacaagaattacgataattacaccaagtccgatcgcaattcgtggcaagtaattcttccacaaatttttcttattgtcggtggtttctcgtacttcttcactcttattatcaatcgagttttctacgtactcatctggcttagcttctggtacatcatcgtggtaatcacttaataactccttaccatccaagccaacaacttgtgcatattgacgaataaatgctctaacataaaaatcgcctggaagtttatcaaattcattcttctcaatcgcttcaagatatctgctctgaattttagtagctttttcaatatctgcaattgaaagtcccttagcctctctggcgctctttaatttatctccgatatctgccatatttacctcttcaaattttaatttatcatgttgagtataccataaaattctcattacaacgtcttagttataaaagccatccacctgtaacataaattgtctgtcctgttaaataactactacgtcgatctagcagtgttctaacccagtatgaaatatcactgccattggcccaacgaccaactgggatttcatcttttacctcttgaatcgtatcctcagaaaagaatgcattcattttggttttaaccgcaccaggcgcaattacattaaccgttaagttattggaagcaacttcacgcgcataagcctgagcgaacctggttataccacctttagttgcactatagacgctttctaatgcactacctgcaccaccatagactgagcctaaataaactatacgactaaaatctcgtttcatcagttgtggctctaacaatttagttaacttaattggcacagtaagattaatattaatcagatcagtgatatttgctaatttttcatcacctaaaaaaccatacttagtaattccttgagcaaaaactactgcattaactggcaacaagtttttaacaaaatctgttaactgtgcatcccctgtcgcaaaatccaactgtagcgacataaaatcctggtcaggatgcttagcaaacagctcttgaactaaattttcagctttttgagaattagaatgataatgcaagtataatgaccaaccggcatctgccaaatctcgacaaatatcttgaccaataccgccagttgcaccaaagacaattgctcgcttcaactttatcaaccccttacttgttttctaagtaagcagaacaaagttcactgtctttcataatcttttggcagtagtcataaaactgatcaaaattcatcgcctgcaatttagctatattttgtgttaaattttcatgatctaaattttcttcaattaattcaattgccaaataagacagatcattacttgtcctagcagtgcgtgctaaccattctttcttttgcaaaatgaagttttgtctaataaaacggtattccgctgaatttttcttaattggttccgtcaataccctctttatttctgcaattacttcttgagcttgaggacttacaccaaaaatagtagcaaaatcgccctgcctggtgtaattaacagaaatctgcagcgaatccattaacaactgcttttttctcatttcttcaaaccatggtcccattgcacttagttttgattctaacattatttctaacagaatttgagtcaaatcaaagcttaataatactttcttaaagtttttaaagcgaattcctaaaccaaaggaattagaattacctctggctggcaagacttgatcatgtaacatgcgaaaactaacttgtttttcagctgtgcttttacctttcccgtgcaaatatttttgctgcagctttcctacttgccgcaaaatcgtttgcacttgattatcagaaaaatcaccgcaagcaacaaattgcatcttttctggcacatacttagcctcataaacttgggtcaagtttttcactgtaacttgattaattgattctttcgtacctacaacttcgatccctagattagaatcaccaaacatatcatgcataatcgcattatttacgctccaagttgggtcatcctgatacatggccaattcttgttcaataatcggagcctcttgcgcgatattttccttagtaaaatacggctgccctaccaattcaaacaagagatcgatcattttaggcgtatgctcaattccactacaataaaacattgtttcattaaaagacgtgaatgcattaacgtcagcaccaatatcttcaaattgcgttgacaaatcaccatcttttttggcaaatagcttatgctctaagaaatgagccgaaccggcaaccttttgtggatcactactaccaaagtcaacaattataccgaaaaatcgttgataaaaatgtggctttaaaataatttcggctttaaagcctgactgatattcttttttgataatttttggtgtcatcattttaaaacataactttcattaaagaataaattttgtgcgaaagctactaactgcttaggtgtagctctcctaattgcattttcacgatcaaagtctaaatatcccgagaacaattcatcacgcaacatttgacccatctgccagttttgaccgtctagaccaatcttcatattacgcaaaattgcctttttagcctttttaaataaatcatcttctacttcgccctgaactagtttacccatttcggataaaataatttttcgagccgctgcaatcttactaggatcaagtcctgcactgactaaaaacaaagaattattggcaaagcagcttgcttcaacattataagctgctcccaattgctcccgaatttgcgtaaataatttagatgattgatcacctgccaaatattgcgataataatattcccattacttgaccgcgataatcaatactttgttctaaaccaaagcccattaacaattgagcttgcacatttccttgatcatcctctttttcaatcaactttcttttagctggaatagttagactagctgtttgaaatgatttagttaaaccagtttgttgaaacatagcctgagctaatttagaaaccagattattatccctggtcattcctaaaatttgcattggtacattagctaaattacgccaataatgcatcatagtcgtgctagtcgcagctttgatttcatctagtgagccaataaatgtctccgcataatcaggttgatcctgataccacaatttaaaaaactgctccaacgcataattagatggttgttcaatcagttcttgatattcttctgctaattgacgtttagcatattccaccaaaggttccgcaaaattaggttgattaactatttgtgcaatcacattaagaatttcttcatacgtataatgtggatccaaaatctcaatcggctcaacaaaattggcataataagtcaaaagtatttctttaccaaaaacttgtggcataatctccagctgtaaatcatataattctgccaatcttttttgttgtaaagcaagtgacggataacttaagctgctattcatctgtattcgcgctagcaaactagcataagctaaattatgtttagtcagcggcaaacgcaaaaaacagccaatagcggctgttgtaaactttttattttttctaattgcaatattagttgtgagcattgtttgaattaccttcattctttattggtggcactaaaacttgtcgtggcttagagccttcagatggaccaacaatccctttagcttccatttcatcaacaattctagcagcacgattataaccaattctaaacctacgctgcaacattgacacgctggccgtctgttgacgtcgtactaaatcaacagcttgctcatagaattcatctgctggctcatcatctttactatcagcatttgatgaattttcaccttttttaggaatcattgtctcatcataactaacctcttgttgcttcttaacccattcaattacgcgttcaacttcatcactagcaatataagcaccttgaacacgttcaggtttagatgccccaattggcatataaagcatatcaccacgaccaagtaatttttctgcacctgtttgatccaaaatagtccttgaatccactccacttgatacagcaaaggaaattctcgatggtacatttgctttaatcaaaccagtaataacatcaacacttggacgctgagttgccaaaatcatatgaattccggcagcacgtgccatttgtcctaaacgaacaatcgcgccttcaacatcgtgaccaccaaccatcatcaaatcactaagttcgtcaactacaactagaatataaggtaacggcttcatcactggtttagttttatcacgattgttttcagcaactttttgattatattcactcatgtttcgcacgccaccagccgcaaatagcttatatctgcgctccatttctttaacaactttgcgcagtgcatttgcggctagcttagcatcggtcaccacagggatcaataaatgcggcacaccattataaactgaaagttcgaccatcttggggtcaattaaaactaatttaacttcttcaggccgcgccttcattaaaatactggctaaaattgtattaatcgctacggacttaccagaaccagttgaaccagcaatcaataggtgtggcatcttagctaagttggcagaaataatgcttccagttacatctttacccaatggtacatccatcggatcgcttttggctttattatcttgatgttccatcacgtctttgaatgaaacaacagacgttgctcggttaggtacctcaattccgataaagggcttaccaggaattggtgcttcaattcgaatatctttagccgcaagcgccaaagccaaatcatccgctaagtttacaattcgacttaccttaacgccaacagctggctggacttcataacgcgtaatagttggtcctaaaatagcttttttaataatcaccttaacgccaaaactcttaaacgttgattgcaaaacttgggtatttttcttaattaaatcacggtcagtactctgatcagtcgatttaattggatcaagtaagcttaaaggtggcatcttataagctttattgactggcgcatcagtttttagttcaccatgatcgacatcggctaattcctgctttaacttttgatcatcttccgcaaaagaatgtgacttaggtagttcctttaccccgtcatcatgttgtggtgcaatttgaatttgcggttctggatcaggtgtggtctctggctcaacttctacgtcttcagccgtcggcgttacatcgtcatcagttggatcggcagggtcaaagtctgctacattaggaaaaatcggtttatcgtcatcaactaaatcttcgtcttgttcctcttttttctgacgccgcttttccaaaacgtcattatatttatctttgacctttaccccagcttctttattctttttgatgaataattgactaactgtctggaatttttcgataattgttctaaatttaacatcaaaaaacatcaaaattccaattggcagcaataaaatagcaaaaacacggacaccgatttgccctagtagtggataaaaaagttgataagctaatgaaccaattaatccaccaccaatgctctcagtgactccagcacgaccaaactccgcggccattgcatgccaaaaagaattcaggaaattactgttaactaattcatgttcaaaatacaagttacattgaattaacagaattcccaaaaaagcgattgctaaccccaagctacgcttaattgttaagtgaatcggttgattatagattaaatttactaggccaaaaagtcccagtaaacctgccgcaaacaaataagaatccccgaagaacattcgaatcaaatttgcgatttgcttacccaaaataccgaaacggacaaaagccagccccgctattaaaatcaagactaaaccacaaatactccaattaagattttgctttttgtttgcttttcgcttattgtagctctttttggcctttctttgtttcttttttgcaggcatgtactcacctgattaattatcgaattcagccttgaagttcaagttaaccggctgacccaaagttaattgggttgtttcatagatcaaggtctcaagttgctcaactaatggtcgagttagtaactgccaatctgaattactaatgtcagagccatcaccatggtaatcttttaattgcacgatttgatgaatcaagccgcttgcttcaaacatagctggtgcaggaattacatcatattgaatagcaacatcatagtaactaccattttcttctgaatgctcatcgtcaccgctaacatctaattttctaattcctggtctaacgtcactaattggtttggtatcttcatcaactaaatcataatgaaatgcctgtacgataatatctgtctgtttttcaaaatccattatttattctcccctagattacgttcatatctttcaggacgatcatagtcatcttttaacttgtcattttcataatgatgggttgtttccatattaggaaaaccttgctggcgtaaagcttctagcaaaaccattgctacagaattagacaagttataacaccgaatgttatcagacattgggatacgtaaattacggtcatagtattcacgcataaaagtttctggcaaaccagttgtttctttaccaaaaacaaagtaataattcttgttaggatcagtataatcgacttgtgcataattttttgatgagaatttagaaattaaatacatctcatcattaggccctaaagtcttcaaaaaggcattcaagtcatcatgtctgcgtacatcgaccttatcccaataatcaagacctgctcgcttcatttttttattatcgatttgaaaaccaagtggttcaatcaaatcaaggacagtgttagtccccgcacaagtacgagcaatattgccagtattagctggcatcaatggttcatacaaaactacatgattagtcattcaaaaaactccttatcaaaaaaagcgtagcttttaagccacgctttaaaactatctagtatttattcgctttcgtcatgatctgcatcccccgtggtcgaagaaacagcattctcttcaaagagtttagactctcttcgataataattgtacacgcgagacacaataatcttcaagatcgcataaattggaataccgaaaactacaccccataagccccagacggcactagcaccaatcaagagtaaaattgttgtaattgggtgcatttccattttattccccattacccatgggctaagaattcttgattcaattgtttgttcaatagcaaaaacaattaagaccttaattaacattgaacctgaagtcataattgaaattacaattacaggaatcattgctaatggtgtaccaaagtatgggattaagttcataaacccagctaaaattgccaaagccacgccatatggtaaaccaattagaatgtaacccaatgagaacatcacacctacccaaaaggcaacagtaatttgaccacggacatatgaagcaacagcatagttaatatcatataataatttgctaaaactaggttgccatttttcaggtgcaaacttggtaatatatggccgcagttgatgaccatcttttaacatgaagaataaaataaacggtgcagttaacaaagtcatagccaccattgtaataatgctgacggcagatgaaatattgccgatagttgcattgatggtactttgtccagacttaaataaggtcttctgcgtattatcaatcatgcctttgatactgcctttaaatgaatgtaaacgcggatcttgcaacgcattttgtgttgcattaaccgcatcattccaaatatgaggccagttctttatcaatgaattaatctgattctgtgcaattggaaccaagatattaataatccaaattaatgcgacaactactagtaagaataaaactataattgtcaccactcgcggaatcttaaattttctttcacaccaatcaacaaccggattcatgatatagtactgaattaccgctaataataatggcggtaaaattgcactaaagaagatccaggcaggattcaatacaaaagatactttattaaagacccaaataattaaaaagaatagcaggacgtttaataaaacaatactaaaacgattatctaagaaccattttttaaaaacagttccacccctatgttggttattttccatctattcatcctaatttttaaatgtgttcataaacaatatcatcatcaaccttaaaattaggtaatggttgatcaatatccggatcaaagtagatcgcattagcaagtggcgtcttagaaacgggacggttaaagaacaaggttgcgtgtcccaatgccttcatgttgctctctaccatcggaccaacatagtttgcaacataggtttgaccatcaacagtgattgtatcgccttttttaaaaacaaaaccactaactggcgtctcagtactgaatttttgaatgacagaaacgtcttccaaatccttattagcaccctcgccaaataaaattaccatgccatctttattatcgacggcctttttaccaatttttttaatatttgcaatccatttcataatataatctctccttatattttgtttcatttatttctattttactttaagttgtaggaataaaaaagccatgacgttctattgcgccatgactttggtactaatgctaattactatttggtgaaaagaacgcgagtgccttctggtacggaaatttctttttgaataggagttaggctaccagtaccagcgtttcttgtgtaaagagtagcattatctgtattttgattagcgacaacgacgtagcgctgatctttatcccaattaaaatcacgagggaagtcaccaaaagtggatacacgttgaaccaggctcaaagtatgatcgtcgttaactttgaagacagcaattgaattatgtcccctgttggaagtgtaaacatatttgccatcttgactaatatataaggcagcagctccgttatggtcagtaaaatcagcgggaattgtcttataagtagcaatattttcaaagtcccaagtgtcttcgttaaatttaacgacattgatttgactagaaagttcaccgacaacgtagaagtaattgccatctttactgaagacgatatgacgtgtaccaaagccagtttcgcacttatattgagcaatgtgttttaattgatcattttctaatctataaaaatcaacggtatcattgcctagatcacaactaaccaagttaccagctggggtttcatcaaagaagtgagggtgaggaccgtcaacttgttcaggacgcggacccaacgtttcagctttgtgagttacagtatcaactagatcgagcttgccactgtcgttgtagcggaaaacggacaagacagcagtatgatagttagcagtgtaaatcaactttttggtgcggttaattcctacataagctggcgaagagcctggagttaaatagtggtcaacttcgtttgcgccttgatcacttaattgaaagacgctgattccacctttatcgccagcgttattaacagtaaaaattaaattaccatcttttcggaaataagttggaccaccaacgctaataatattctcagctttgcctaaacgggcatcatttgctgcactggtaataggtaattcataaatccctttggaagtttttttggtgtaacctccgattaaaaccttcatatgtgtgggcctccatctctaaataaaaataagtctaaaataaagtatagcatgaaagcggattagacgcttaaaaacacgatttcctgttgagcaaaaaataatcgccgattttgggctgcttaagtttttaagcagcttttcttatgctaaaattatttttaagtcatgtggtaataagtcaaatgaaaggcgatgatatttgttctttttgatcataaatttgagtatatgaaactaagccttggtaaaggttgatttttttaatgttaaacttttgtttacttttaaatttagaccaatttttgaaattaagacctcggtgtcctgtacagtttgtcatctttgagcaatttaaagataactcgtactaattttcttgcagttaatgtgcaagcacgtttatgcggcgagtagacagcttcatcatacttcttttggtaatattttttgaaaacaggatcatgtaatcttgctagattggcagcttcaatcaagtaatatcttagatatctgtttccagtcctggccattggagtatgttcgttgctgtgatctcccgattgatattgattccaggttaggccggcatacttagccagctgttcttctttatcaaagcgatcgatacttccgatctcagcgataataccagctgtataggttttgccaataccgggaattgattccagaattttgctttctggtaatgcatcaacgatacgatcaattgctttttctagatctttaatagattcattaaagctttgaatcatgttgtaatgaacagaaagcactgcatcaattgaatcagtcattactttgcctaagcgatatgaacctctaacagctttcttaattgctttagccaaggtatctggatcggaaaagcgtcctctgcctttaacctgtaagtaagaaattaagtcttcggtaggcatatccgcgatctcatccagagttttactatcggttacaatagacatcattgtagcaccgaaaagaggagtattaatcttatctttatcgacagtgattagtttattaacccgataatataaagcttcaatgaagtgctgtttggtacgagtcagttcttgaactaattcatatctggtacgcgttaaacgctctaaagcaagatagttgtcttgtctggcaatgcttactcgataatgtccaaagcttagatacaaagcaatgtaataagcatcgagaggatcagttttactttcttcaaagactttatgaaacctgctggtttctttggggttaattacatcagtctctacattgagcttttgtaaatcttcgtcattttggaaaaagtaagcaggatgaaaactgtaaatagatgtagcttccatgccaataatgatttgatcatagtgtttattttgagctagatctaaaatttgttttttcagttcactagcaccataaagatcattgacaaagctatcgttaattaagcgtttgttttgatcttctgaatcaagtgcaacgacctgtaaatctttagaactaacatcaataccgacaaataatttcattggaaatggcctcctttctttcaaatttctgatcatagattttgatcttcacatgttaacccctaattacagttcttaagttcaatctcgccagtataagtattcactggttgcttctttgaaagctgcacctaatcccaattgctcaaggactagcaaaaagaagcaatcaatacagcatgtgagttagagcataaaggaactgtctgggtggcagacttataaagcagacaaaactgcaggaggtgataacctagaccagttgaccaaagccaatgacaattagaggctaacatgtgaagatcaaaaagcaaatactaatttgattaattatcacaatatgactaattacaatttatataatacgaggaggtgacaaagtgaaaagaaaaataattcgaatattacttttcattcttggcgggatattagggttactacttctgtataaactctatttaaattaccgtcctgaattgaatttattacttcattttgatcaccataatgaagaagtactcgttaacatggtccgtagccatggtattgaagacttagcctttttatttttacttaatgcgatctgtgtagcaattcctggcttatccaacggaatcttttgtgttctcaacggaatcctttatggccctgcctggggatttattgttaattggatcagtgacattttaggccaaataattttaatggaacttttgcaaaaactctatgacatgaaaaagatgtctaacagtaaagtttataagttattgactggattaaaatcaccaatgcttggattaattattggatatatgattccatttattccgagtgcgacagttagctatgtcaacattatgattaataaggagcaacgtaaaaaacagctaataccaatcattatcggtgtcatccccttcgcttacttatatgcttatggtggcgattcaatcttgcacttagacggaacacgattgattaaagttgtaatctcattcgttgtcattgctttaattgcagtagctattttgcttagtctgagagcaatcaaaaagcgtacaaaaaaagcttgaatttactcaagcttttttattatgcctagcatatttaaactaagttagcttcttctaacagttcttcgacccaagttctcttgattttcttcatccctgttttgagagctaacttctcaggtaatggcatctcttgatcaactaatttcttcttgtcagacatgtagtacatcgcacgaagcaattgacgaatatcataaattgagtcaaatacttcaggtacaccacggtcaacgttaagcaatgtataaacagcttccatggcagttctgacagaatattcggtggtaaagacagtgtctctagttggtgattcggcaaaattgccaataaaggcaatattaactgatccttctggaacaacatctggacggtccccatcatgacgaggcataaagtaactagtgatatatggcatgtaaactggtacggtattcatattttcttcactagccaattcgctgatttgactctctggcacgcctaagtgatagagcatttcctcggcaatttctttaccagtacagtcaacgactctcttcttgatgtaattaccctcagtatcagaatacaaagcataaatccaaacaacgatttgatctggattctggctcttaaagtgaggttgacggtgaatagtaaagctaagttcccaattagagtcaacaacagtgataattccaccagtattaactttaccatcgtaaaggctgcgcttagtcaagcgttcaaagtatggagctattttcttattttccaaggtagctgtagctgatacgaaccaactacgctctggcaagttttcacagaagacatctggatgaccaaagtcaggatcttgtttagccaaattttcccataatttccatgaagagcccttgtcgtgagtaattggtgctggggtattttgatcaccataagtagaactttcagtgattgaaccgttagtcacaaagacaatatcatctggggttaaatcaatatcactttgctcaccattcttggtcatcacgatcttcttggcaaccttttgcttgccctcatgatcaacaaccacgttatcaacgtgacaatcatattcaaattgaacaccgtgatcttttaaatatgccaaaagtggcttaaccatggactcatattggttatacttgttaaacttcaatgcggtaaagtcaggcaaaccatcaatatggtgaataaagcgcattgcataacgccgcatttcggctgctgagtgccatttttcaaaggcaaacattgttgcccagtatgtccagaaattagtcttaaagaagtcatcactgaagaattcttcaattgtttcaccttggagttccttttccggtgtcatgattaacttcacgatttcattagtgcacttacctagaccatattgaccatcacttggtaagcgatcaccgcgattataaattagacggcaattggatgagttaggatcttctttatcaagccaataatattcatctaagtatgatgcgccagggatttccaaacttggaatcgatctgtacatatcccacaaacattcaaagtggttctccatttcgcggccgccccgaaccacgaaacctgcattaggacgcttagcaccatcaagtgaaccaccagctacgggtagctcttctaaaatatgaatattttcacccttcatttgtgcatcacgaactaaaaagacagctgcagaaagaccggctaaaccactaccaataatataagcagattttttatctacgcctgcgggctttttggcatccgcaaaagcctcataattaccattggaatagtacataaagatatcctcttttctgtataagtatagtttttaacattacactttaattataaagaaagcggttactagatgcgagttttttagaagttttagctaataactttagaattctttattaattagtttctgccacagttcttgcatatcttttggatcattcaactcaattgttttacatttttgctggctaaatggatccggaaaatttaaataaaagcaatttaaggcttggcgtgaaaacccatcttgaattccatataaaggatcaccatataaggggtgtcccagataagccatgtgaacacggatctgatgggttctaccggtaagcaagcgtaactctaccaagctagcacctgtaacctgatctaggactcgatacgcggtttgagcgtcctttccatctgccactactgcacgtttaactccactaccctttttgccaatcggttgatcaattaaaccagttaactcattcggagcaaaattgccatgtacaattgcatgatattttttgacaaatttctccttgccaattttactaaaacgagcatgggaaattgcatttttccccaccaatactaaaccagatgtatctcgatctaatctagtaataacatgcggcttcaaatttttctgtcctttttgggcaaaataacccaacaatcgattgaccaccgcatcatcatcttcatagcgtgagggaattgacaacacacctgcaggtttgttaactacaagataatttttattctccaacacaattgatactggattattcgatggctttaaaaaatcatttttcttttcttcaccactgataaaaatcacttcatccccagcacgcaaattaaagctagtatatcttcttttatgatttactaaaatcatgccatgatggtgtttagcattgtttaacgcttgatgcgaaaaaccattttttaacaaaaaaggacccagctttttggggtctctttcttgcacaattagtttaaataaactagtcatttttttcattatctccaataaacgcattttgtacgcgtgaccaaaaatgatggtggccaaattgatcaaactgaatcgaatgccgcgaaattcgatattcaatcttcttagcattacgtacatcaattcttgctccatcaactgtcatcacaaaatgatctgcattaggaacaatcgaaatccattgatcaggcgcaatcacaattggtgatgacaaagttctaaaaactcgattattaattgaggcaatttcagtcatttgcaacgcttttagccggggatgaattactgcaccacctagtgatttgccataagcagtcgaacctgttggtgttgaaacgcaaagaccatcgcctcgaaagttttcaaataattgatcattaatgtacacatcggcctctaatgtatgtgaaactcttttaaccgctgattcattgacggctaaatggtaatgagtttcacctgattcagtgagcatctttatttctagtaaaggatacttcgctggttcacccttggttactgctaaagcatcaaccattttttcaatatcatagttacgccaatcagtataaaaacctaagtggccagtatgaatcccaataaagcgcacagaatctacttgattttcatagcggtggaaggcattgatgagggtgccatcaccgccaacagtgatcactacatcaggatatctagcatcaaagataaaacctttttcctgaagcagcttcttaagctgcgcaactgtctttaatgtttcatcatagttattatgcgctattgttactttcataatttttctttgcccttatttttggtaaaaattttctgagcttcttggacctcatccttaattgacgacatttcttcgtctagtctataagcggcttcagccgttgattttaatctagctgaaatgtcatcaggatagacaccttgatatttgtaatttaaagtatgttcgacagtagcccaaaagttcattgccatagttctaatctgaacttccgcaattaattttttcggaccttctggtaagtaaaccgtatagttaatcaccatgtggtatgaccgatatccactcggcttagcattttgaatataatcacgctcctcaacaacttccatatcatctcgagcatgaatcaaatctactaccttataaatatcgtctacaaattgagtaacaatcctaatccctgcaatatcttgcatatcagtctcaatgacatcaggactaattactcgccgtttcattttttccttgatagaatcaactgtctttacccggccaattacaaattcaataggtgaatgttctcccttagttaaaaagccttgtctaagggaacgaaatttaacctttaactcgcgaacagcttcgttataaggccacaagaagttatcccaatctaattccatgagaaaacattcctttcttaagcaaacaaactcattttaccatataattaagttaaacagttcggaggaaaaacagatgagtaaaaatcgagaaattgaagcaaaaactcttttaaataaaagcgtttatgatcagatcactgccgcttttccaatcaaaagtgactttacccaagaaaattattattttgatacagtagatgatttattaaaaaatcatcaaattagcttgcgtattcgaatctatgctactcacgcagagcaaacaatgaaggtaccggatcctaatcctgtacaaaagaatttccatgaagtaattgaaattaatgatgaattaactcacgctcaagctaaaaaattagtagcaaaaaagcattttaaattcactggtaatattggcgcatatctagataatcattttgccaatgaccaaaaaaagctacatcttttcacctggagcaaaacccgcagaattttgatgaacgggccacaaaactgtgaattaactctagatgctacgtcttatccagataactatcaagattttgaattagaaatcgaaaatactaatcctgctttaattcaaacagtattaactaaacttgaacaagaatatgactttgaacaaacggctgctaacactaatcaaagcaaaatagctcgtgcaagcgctcaccaaaaatagtatatagaaaataaggcatattttttgtcacttattttttttcttgctaaagtaactaatagtaaatcaccaaagaggtcgagattatgtttgagatttttctattcatcaatccaatagggatttattgttatgacactgaaaaacagattcgtaaaaccgttgatgaattaggggtcgacgtttgttatcactatattcccattgcaaatgtttgtttaatcaatgatgatgcgattcgccgacgcaaagatgaccagaagttgcctgatattagtaatttttctagagcaacttatgaagcattagaaaattaccacgcgattaggctggcctatggcaacaaaaaagcccgtcaatacctgtatgaattacaaaaaaacttgagcaaagatgcttcagcttatacacctgagctgcttaagcggatcgcaaacaaattacatatcaaggatgcggatattcaggcaatcaaacaaactgattacctgcgtacttctattgaagaagatcaaaaactagccaaccaatggaatattaaagctactcctaccaccgttatctttaacgaagacaacgagcaaaatggagtattgctagagggaccaatcaatcaacaggatttagttaatctaatgcttccagattgtcaaaagtgtttttcagactatttacctgcggagcatcatttacgccttatctaaaggcgttttatttttgcaaaaaatcactaacccgatctctttcacctgggttacgccaagtagcaaaaactttatcaggtaaatcatcaagagttaatttgcgttcataaagcatctctcctattttcaatcctaacttttttttttgcataatttgctggcgtaaatattttctttgagttgcaatgttcaaagaatattcttttttgaatggcttaaagcgccaaaaatcttttatccccaattcatcaaggacaaatgatttactttgataaaccaatttattagctaccggttcttcgaaaacattatattttaagcaaaaacgatttctctgtggattaatttctaaatagtaattcccccaagctttattttgtcgaaagaaaatcaactgtgtgcgtttcaatcgccgtttcaaatagtgtcgctgtcccacaatccaaatatcttttacaccaattttttgataaagctgatgccgatggttaaattcttgttgactcaacggcgcacattgaacttcaaacgctaacttagcagttgctaagacatctgcacgcaattgtccttcagctaatggaatctcaacttctgccggaaaaccagctgccgtcaaagctgacttcaacagcattttcgattggtgatgctcctctttttcacccattaagttactgtacttcacaagatgcttaaaaaaggctgctttttgctccgacataaccaaaattacttttttattgcaatgtggacagtgataattatcacgattcaatttcttttgccttgcattaactaaacatgcttcgtcaactgcaaggactaatttcttatttaacatggctgcatacatttttctcacccatgttttattacgtaaaaaagagacggaattttgtcccgtctctttttctttaaagaatcttaataattagctgcttttaaaaagtaatgtcgaatctggcctaaagcattttgcatcaataagcatttgcctgtttcttcaactacacgcatcttatcactatcgaccttaaaaccaaattcgttggctattgtccacgcatctgctggtttaagctcctcatattcttcatcaagaaatgccaaatttaagaaatattgtccatgcaagtaatacaagctagaagctaaatcatttgccttaaggttatcagctaattcaattagactacctaaatcatcaaaatagtaagcctgagtcttgcgcgatctccaatcagttggctcattgtttttatcatcttggttaaaaaagttgtgagtagctggtccttgaggagccgaatttgaattcgtactctcctcatctaaatcaaagaaactttttgaatcatccgaattcgttgatgattgctcatccttaggaaagctatcacccattagtttccttaaattctgtgcatcgtccggcttaactttggtgatcatcaaatctaatcccccattattaggcattacttgaaatgatactggatcaccattggcaaattcatggtcttcatcgacctcatcaagaattttatagaagaagtcttgaatcttttgtctattacctaataaatcaagcattcccatcccacgacgagccaattcagctttatcaattcgaactctgatagtattcttatcaatatgatctacctgcacaggatctcacctccatgaattaatatatctattgtagcgtatttttcgtttaaaataaaagtgttagtctcaacaaaagccttaactaacacttttcaatcattttataaatctgcaatcttttgtgcttcagccaattccaaccgacgaacttttcgtggcaagaatcgacgaatttcatcttcattgtaaccaacttgaagtcgacgatcatccataatgattggtcttcttaacaagctaggattcttttctactaaatcaagtaactgatcaattgataaatcgtctaaattgattcgcaattgttgaaaagctcttgagcgggtagaaatgatttcctcagtaccattttcagtcatccgcaagatctttaataattcttttttagtcaatggttcagaaaaaatgtttctttccttgaatggaatattatgtttttcaagccacgctcttgccttgcgacatgaagtacaactaggagagacatataaatctaccataaaaatcacgctcctcagaacaaatatttgtatacgtttctttactcatagctagtataccatataagcttctttttcgtaagtgcttaatttatcgtttacctctgctatttacttaatactaaagataaaacgtgaattatttgtgaagatttcgttcgttttgtttaaaattattaaaaataaaaaaagagacatcacagtctctttttgcaaattaaaactacttgttcaattttttcattaaattattaactaatttttcgttgtcttcagcagtttctgatacataacaagcttcgttagctaattctttaatgtcagcagtgttcaatttcttcattaagcttctgatacgcaaaattgaagttgcactcattgagtattcatcaagtcccattgaaagtaagattgggaacatagtgttatcaccagcagcttcaccacacataccacaccaaataccgttttcatgagcaccatcaatagtgtgcttaatcaaacgaagtactgatgggttatatggttggtacaagtatgacacattatcattaccacggtcagcagccatagtatattgaattaagtcattagtaccaattgagaagaagtcaacttcctttgcaaattgatcagctaaaacggctgcagcaggtacttcaatcatcataccgacttgcaagtcatcaccaatcttaacgccttctttagcgagcttatctttttcttcagctaaaatttgcttagcttcacgtaattctgctaaagtaccgatcattgggaacataattcctaatggaccgtatgcagatgcacgaagtaaagctcttaattgagttctaaagatatccttgtattgcatagaaagacggatagcacgaacacctaagaatgggttcatttcttctggaagatcccagtaatcaaggtgcttgtcaccaccgatatcacaggttctgataatggtttgcttaccattcataccttcaataacttccttgtaggcatcaaattgagcttcttcagttggaaagtcactagagtccatgtacaagaactctgttctgtacaaaccaatggcttccgcaccattatcctttacacctggcatatcattaggtgtaccaatgttagcagcaatgataaatttcttaccatctgcagtaactgatggttcattcttaagcttagcccattctgccttttgcttaatgaatgcttcactcttttgcttgtaatcagctacttgagcgtcacttggatcaataattgcatccccgtcaagaccatcagcaattaacatatcgccgttcttaacatccttagtaattgagtcagtaccaacaacagctggcaattcaagtgaacgagccataatagctgagtgagctgtacgaccaccaatatcagtaacaaaacccttaacatactttttgttaagttgagcagtgtcacttggagttaagtcgtgagctacaacaattacttcatgatcgattgaagcaggatttggtaattccttaccaagaaggtgagccataatacgctttgaaacatcacgtacgtcagcagcacgttcttgcatgtaaggattatctgtcatcccttcaaaaatagcaataaacttcttagcagtctcatcaagagcagcttctgcgttgatctttgaatccttaatttcattctcaatggcaccagtaaattctgggtcatttaaaatcattaagtgtgcttcaaaaacttgagcttcttcatcgcccaagctttctttagcaatatcatgaatcttttcaacttcagcagttgaagtcttaattgcatcgttgtaacgagctacttcagcttcaacatcagcaattgaagatttagagaatgaaagatcaggctccacaagaagatatgctggagcaatagcgataccatcacttgcagcaattccttttaaagtcttggtcattattcagctaaaccttcttttttcatagtgtcggcaattgcgtccaatgcgtccttttcgtcatcaccttcagcagtgatagtaacatcagcattttgaccaacaccaagtgacataacacccatgattgacttcaagtttactgacttaccgttgtattccaagttaacatctgagccaaactttgaagcagcttgtactaaaagagtagctggacgtgcatgaatacctgtttctgcaatgatatgaaaatcgcgtttttccattataaatatctcctttaaattgaaaaattaaactggtaataaatacccattcgagtattagattatcatgtttttacagattagacaactgcaatgtaacagtttacattatttattcatcggtattcgtagcggtatacacaatcgcgccgcctctttctgccctaccggtaatatattgtctttttccataatttctaatagtcttttgaagatcaaacgcatcttttggctcaactttatactcttttatctcgcctgagactaattgatctagaattttctgataatccaaaaatatcaccactcttttaaaattttataatttttccactattaattctactcgtattatataaattaaatcgtattatataaattaaatcagtgataatgattattcttttagtttgtttattcgatcatcagatgctagtctctaattgtcattgaccttggtcaattggtataggttgtttccttctgtagctttgactacttttttagtctgccgcccaagcagttttactaatgacttactcacatgctgtatcgattctggctattactgattcagagcagattcagtcgcagctttttagcttgaacctatgaatacttatattttgcgagattgtcttagaatctgtaattagggactaacatgtgatgatcgatctatgaccaaatatttgctagaaaggaggccattctcaatgaaactttttatcggaattgacgttagttcaaaagatcttcaagtcgctattactgactcagaaaattatcaaaaacctttacttaaccaatctttttctaatgacctgattggtgctaatgaggtcaaaaagataattcttcaacttgctaaacagaacagctatgacaaagtaattatcggcatggaagccacttcaatctatagctttcaccctgcttatttctttgccaatgacgaagatttacaaaaaattaatcttgaaactgatgtcattaatcctaaaaacactaaacgatttcatgacgtttacgaagaaaataagaatgatcctactgatgcctattacatcgctgaatacttacgctttggtaaataccatgtcactattgctcggcaagaggaatacttagctttacagcgtttaactagagctagatatgaaatcacatcttcgctcactagagctaagcagcacttcattgaaactctttattatcgtgtaaacaaactagttaccgttgacaaagacaatattaaaacttctatctttggcgcaacgatgctgtcaattgttactgatagtaaaaccatcgatgaaatcgctgaaatgccaatcgaggatctaattgactaccttcaaaccaaaggacgtggccgcttctctgatccagagactttagctaaagcgatcagaaaagccgttagaggatcatatcgcttaggtaaagtcatgaaagactcgattgatgccgtattatctgtttactatgccgaaattaaaactaatcagaaattgattaagaacttagataaagcaattacagatatcgtccaaacgcttcctgaagagagaatactacaatctattccaggaattgggtcagtttattccgctggtattatcgctgaaatcggcagtattgaccgctttgacactgaagcacagctagctaaatacgctggtctagcttggcgtcaaaagcaatctagtaattttgatagcgaacacaaaccgatgactaaaaacggaaatcattatctaagatattatttggttgaagctgccaacctgattagacaaagagatcccgtttttcggaagtactatcaaaagaaatacgatgaagctttctattctccgcataaacgcgcttgcgttctttgtgcaagaaaattaaccaggaccattttcactctgctcaaaaatggtcaaatctatcaaacaccgaggtgattaattggtctaaaacatttttggaggagtaaataatagttgttaaaaaatcccttgaaatagggcttagtttcatgcacgcaaattttggttttaaaacaaactaattaaaaataaaatttaacttttacattgacttattaccacatgactatttatattcaattttcaaaaatattaatattttgtttgcggtaacaaaagtatttcttacaaaaaataagtgtttgagtcttagcacttgactaccaagagtgctaataatataattttggtacagttgaaaagaaaggcggtactatattttgctttgccaaaattgtcatgagcggcccgcttctattcaccttttcactaaggttaatggccaaagccgcgaaatagatttatgtcaacactgttatcaagaattaaaaaatcaacaaggaaatcaaggaaaaatgaataataatgaattttttggcgactttgatgatttattcaacgcattaaacggaaataacaacaatgccgcaaacaataataatgaaatgagaaataacgaccctagaatgcaaatggggggaggcgctggtaatggtggtcaaaacggcagaagcctacttgaccaatacggaacagacttaactgcccttgctaaaaaaggcaaaattgacccagtaatcggtcgtgataaagagattgctcgggttatcgaaattttaaatagaagaactaagaacaaccctgttttaatcggtgaagcaggtgttggtaagactgccgttgtcgaaggcttagctcaagaaatcgtagatggatcagtaccagcaaaattgcagaacaaacgaattatttcattaaatgttgtttcacttgttcaaggtaccggtattcgtggtcaatttgaacaaagaatggaacaattaattaaagaattacaacaaaacgacgatatcattctttttattgatgaaattcacgaaatcgttggtgccggtaatgctgaaggtggcatggatgccggtaacattattaagccagctttggctcgtggcgaattgcaattagttggtgctactaccatcaaagaataccgcgatattgaaaaagactctgctttagctagacgttttcaaccagttgaagttaaagaaccttcaattgacgaaacaattcgcatcttaaaaggtattcaaaaacgctacgaagactatcaccatgttcactacactgatgaagccattgaagctgccgcaaaactttcagcacgttatattcaagatagatttttaccagacaaggctattgaccttcttgatgaagcaggttctagaatgaacttaaccattccttatattgataaggataaaatgcaagaaagaattaatgccgcagagcaattgaaggaagaagccttaaaaaacgaagattacgaaaaagcagcctactaccgtgatcaaattgaaaaatatgaaaaggttaaagatcaaaaggtagatcctgacaagtcccctgttattactgataagatcatggacaagatcgtagaagaaaaaacaggcattcctgttggtgatattcaaaagcaagaagaaaaccaactgcaaaatctagctgctgatttaaaggctcacgttatcggccaagacaaggctgttgaaaaagtagctcgtgccattcgtcgtaaccgaatcggtttcaacaagtcaggccgtccaattggttcattcctcttcgttggtccaactggtgtcggtaaaactgagttagctaagcaactggctaagcaaatgtttggctcagaagatgcaatgattcgtttcgatatgtctgaatacatggaacaatactcagtttccaaattaattggttctgctccaggttacgtaggctacgaagaagctggtcaattaactgaacaagttagacacaacccatatagtttgatcttgcttgatgaaattgaaaaagctcacccagatgttttgaacctcttcttgcaaattcttgacgatggtcgtttaactgactcacaaggtagaacagtttcattcaaggataccatcattattatgacttctaatgcaggacaaggcattaagaacgctagcgttggctttacagcagaaaacgaagatgaagctaatgaatctgctagaaataatatgagccaattctttaagccagaatttttgaaccgtcttgatgatgtaatcgaatttaatgaattgactaagccagacttgcttaagattgttgacttaatgttgcaaaataccaacaatatggttaaggatcaaggcctacacattgatgtaactgctgctgcaaaagataaattagttgaagatggctttaatcctgccttaggtgctcgtcctcttcgtcgtaccatccaagaagagattgaggataatgtggctgatttcaaacttgatcatgcacaggctaagaatttaaaagccgatgttgttgatggtaaaattgtaatcagtgatgaagcaaataatgaataggatttaataaaagacaaagtccaagttataccaaaagatttcgaagcaatattcgaaatcttttttcttaaaaataaaaatatgctactcaatttgaggtatactaaattagaagaagtaaagctaacagaaacaggtgaattccatgcatttaattgatgtaaccaataattactctgatttggttcacagtcagctcaacactaccgatgcaaactatgttaaagtttattctcttggtaatacttcagttatttatactgaaagtaaggattctatcggtattgcacttgaaaaccatgaccgtcgtgttcgcgaagatgagattgaattcgtaatcaagcgtttaattaaagattatgattcttcatacactttgactgtagacaagagtcgtcatgtaatcgaaattcacgttgacaagtaatccaaatattgttgtatcaaaaaaggaggattgattcattcaattctcctttttctttttgctttaaagtttttctgttaattcaacatctggatatttgtcatggaagaaacgttccgcaaattcattttcaaataagaataatggattaccataacggtccttaactaataagttacgagtattagacatgcgtgggtcaagctgttccggatcaatccagcgcgcaacacgatgaccaatactgttcatttcaacttcagaattatattcattcttcattctgaattggaacacttcaaactgcaattgaccaacagcaccaagaatatactcatccgtttgataattgcggtaaagctgaattgcaccttcttggactagctggttcatccccttatggaatgatttttgcttcatcacgttcttagcagttactcgcataaataattcaggtgtaaattctggtaatggtggataaacaatcttgcgcttaccagcataaatactgtcaccaatttgaaaattaccagtatcgtataagccaactatatcgccagctaccgcatcagaaacttgtactcgctcgcttgacatgaattcagtcgcattatttaaacgaattggcttatcagttctagctaaagttacgtccaagcctttcttgaattcaccagaaccgactctaacaaaggcgattcggtcacggtgatgaggattcatattagcctgaatcttgaagacaaagcctgaaaattctggatcttctggacttagctcctcatccccattaactgtgtgactctctggtgctggagccaaatcaacaaagctgttcaagaatgtctcaaccccaaaattggtcaaagctgagccaaagaagacaggagtttgatcacccatagcaatcttctcgcggtcaaacttgttcccagcttctttaatcaaatcaatttcatccagagtatcctggaattgaggatcttgactaagtggctcactatcaggcaacttaccatcttgatctaatggtaaaaagcgatcttgatcatttttgcggtaaagctcaacacgattattagcgatgtcatatagaccctttaaagtttgacctgaaccaattggccagtccattgctacaccctcgataccaagcaaatcttccaattccgcaattaaatctaatggtggacgtccatcacgatcaagcttgttcataaacgtgaaaattggaataccacgttgcttaacaaccttaaacaacttctttgtctgtggctcgatacctttagcagagtcaattaccatgacagctgagtcaacggccattaatgtacggtaagtatcttctgagaagtcctggtgtcctggcgtatccaaaatattgatacgtttgccttgatattcaaactgcataaccgaactagtaacagaaatcccacgcttcttttcgatttccatccagtcactagtagcaaaattgccagttttacgtgccttaaccgtacctgctttacgaattaccccaccaaacaaaagcatttgttcagtaatcgttgtcttacctgcatcggggtgagaaataattgcaaatgttcttctcttttttactttatctgctaactctttgtccattagtcctcgctatcttcttccttttttgattcatcaatcgttaataataccgtcaacaagcgtgaccccttcatccttctagtggtcaaagtcatcccatcaccaatatcaactgttaacttttctcccttagctggaatcacttttaaagtattgatcacatagcctgctatcgtatcaacatcttccatttgaagattagtaccaaattgctcattaaaatcatctaatggcatcttaccgtaaataatgtacttatttgtagctatttgattaaaaagaatctcagtgtgatcaacctcatcatcaatatcgcccacaatctcttcaaccaaatcttcaattgtagctaatccagttacaccgccatattcatctgtcaaaattgctaattgtcgttgcgtttgctgcatttccatcaacaaatcgcccagctcggcagtttctggtgcaaacagcggctcagtcatgacatctttatagtcaagattatcaaaacccttttgtttagcctttcgtaaaaccgttctgatatgaataatccctacaatcttatccttatcacgttgataaacgggaattctagaatatggctcacgaaggatttcatctagattgtcttgaaaactgacttctcgatcaaccatgaaagcatccgttctaggtaccattacttcacgggctgtcttaccctgaaagtccaaaataccttctagcattgaaaattctgtatcatcaattttatgactttcatgtaaagtaacaatttctttttctaaatgatctttagtccccacttttttatcgccggataatctattttttaagcgaccaaacagagttcccgctccaggatcactattcattttcgtactctctttcttaaaaaagttatctaaatatagctattatagcatagagccaataacaattatgttaaaatagcacataagactaggaggttcgtcatgaaaaaaagtcatgtcttactcgtttttacatttcttttgctaattccctatatctgtagcttagctattattggaatcggctataatgcattagttttacattcagctgaactttatcgcacattaatcggctcattagttggcgcaatcattatgtttgctgtcaaggctactattcaacggcctgttgatttattagctgttcaaaccaacgatggcttactgaagcagcttttacgtttcttcagtatcagacggcgctactggcttttagcagctaatattatcttagactttgttctttgctttgctgctacctacataatacgtgctcttttaacacttgatcaaatcgtaggcggctccatcggctttgttttgttaatcatgtttgtttcaacttgtcttggcgcttatgttgaatacgataacctgtcaatcgaccctgagcagcattaattacttgctggccttcaagtacattacttgggccagtttttttgtatccatgtcaagatcccaagtaatatatggcgtgtcactgtcacccaaattttcatgtacttcaattccgctagcaactacttttttggcaaaatttggcacggtactagtcaacggtaagttgaaaaagactaaagtttgattctcttctacttcctccgctacctctgcagctggtaattcaaacttcattaaacccgttggcacttcatcttttgctacatctgctaaaacgccataccaatacataaagctgtcctcacctgataccactaggacagaacgcttattttctaaattatgatcagctaaaaatttttgaaaagtttcatcattttccatttgctgattagcttccataaagctcttttgagcattcatcaaaccagctggaaatggacgaccaataaataatcttgattcaatatttttcttcattttttctcctaatattctactaattcgtctaaatcaattatttcaccgtttaaaaaggcatcaatctcacctgatgaaaaaccgtgactaaacaaatatttttttattttaaaattgcgttcaatttctggaagatttctaaaacgcttgtaagccttaattccttgtttcttcaaagcttctgtttgtgcattctcatcttctttaagatccattgcatcaataataacgttactaatcccgctatcaaagccatgcgttaataatttagtacgcatcttacgctctaattcacgttgtgaaatcttgccaacttgatggctcatcgacttaatcacgcgttggcccacttcgagccaatcttcttcatcaatttcatctaacttatcctgactaatttcaggatcaacgcctttttgcgtcaactttcgtaataaaattttagggccatcagagccaacacgcaaatcatttttgataaacagcttggcatattgacgatcatcaagatagcctaattcattcaattgactaacagcactattggctgcttcatcagagatttcgtgtttttttaaatattgcagcacctcaaagatggtccgaggctcgtaactcaaaaaatgagccgctaaatcactagccttagcatcagcatcaaattgcctaatcttttcaacctgctcatcatttaattctttacctttaagcagcacaaattctgccaacgttttctctccggcagaaaaagcatattttccatcaataaaaacattatagcgacctggccgtttttgtgcacttactttggttatgatcaacttgtttcacctcgcatatttttctacatccatgctagcaaattttgctaaagcttgctaagaactttttccaggtagtacaattaattgaacacaatttagtttttagtagaaagaattaacgatgaacagaaaatttacccataataaaccaaaacatgaaaaagacgtcatcatcactattaaacgtttaggaattaatggtgaaggaattggttactacaagaaaaagattatcttcattcctggtgccttgccagacgaagtagtagttgccaagattgttaaatcatatccacactacatccaaggcgaactggttagaattaaagaaaaaagtccagatcgcgtagacttccctgaaggtgttgatcccgagattggtggcttagaattagtgcacttgtcttacgacaaacaacttgaattcaagaagaacaatatgcttgaatcattacgcaagtaccatcctcgtaattacaataagtataaagttaaaaatactatcgctgctcctgacccatggcattatcgcaacaaggctcaatatcaaattgaaaaagatcatggtcaacttaagcttggactttttgctccaaattcccaccgcttgattgacttaccaaagatgccaactcaaagtgaagatacacaaaaaacggaacgtaaaatcaaggttttaattgaaaaattgcatgttcctgttgccaactatcgtcgtcatttacctggcattaagaccgtagttgtccgtcaatcagaagcaactaaggaaatccaggtaaccttgatttcgatcggccacaagattaagaacttaatccctcttgctaaagaaattatgaaacttggtcatgtagtttctgtctatcagaatgaaaccgaatggcagaatccacaagtttggggaaataaaaccgaaaagcttttgggcaagaatcaaatcaccgaagaaatcttaggtaaaaaattcgccttatcaccacgtgccttcttccaattgaacccagttcaaaccatcaatctttactcagaagcattgaaatacttagacctaacccccgatcaaaccttgattgatgcctatagtggtgttggtaccttaggtattttggcagctgaccgcgttaagcaagttgttggaatcgaaaccattccagaggcagtcaaagacgcacaacataatgtcgagcttaaccacatcaaaaacgctgattatattcaaggcagtgttgaaaaggttttgccagaattacaaaatagtggtgttgcaatcaatgctttaatcgtagacccaccaagaatgggcttagctaaaagcttgatcaaaaccctcttgcgggttaaacctgaaacttttgtctacatctcatgtaatccctcaaccttagctcaagacttagttttacttagcgaggcatatgatgttcgggtcatccaaaatgtagacatgttaccacaaaccccacgctgtgaggcaattgctaagttagtgctcagaaaagatagataaatccaacaacctagtcttgggctaggttgtttttgtatataaaaaagcggctactggacaatcctgtcccttagtagccgcaatttcaagtggatgaggtagctcatcaattgatagtcacgatttttagttgtttggtatgtatttaaacaatggcattatcgcaaccaatattaacattcacttgttcgggtctttacataaaatgtaacttttaataaattggagtttttgcgaacagccaatgataattaatcaaataatttttaattaagctatttatggctgacacctctacgtatagagaatctttcaagtttccaataataatacaattctggagataaaaacttacttatatttttttatagttgttaacttttatttctacctcttccacactattcattatatctagttgtgaaaccgtttacaagaactaacccatatatttttgcaaaaatctttctacttgttgtcgatattgctttggatacattggataagacaaagcatgccctgcaagtggcgcaagccaaatttgcttttgagcagctgttgccgcataattttgccagaccatcttagttggcacaaagtgatccttgccgccatgaataaataaaaatggtcgcgtatttttatttaactgagcaaccgcagaagcatcttttaaataaaagccatttttcactctattaattccactaaccaaatcaactattggaaaccgtggaaaagccttcatatgaaataaattttgagcttgatagttaatttcacctttcacggttgaataaccacaatcttcaataaaagctttcacttgtggtggcaaaagcataccgcttaccatcattgccgttgcaccacccatgctttgacccataattacaattttggcatttgtaccagtttgatcaattacttgatagatccaacgcaaaatatcatctttttcagcccagccatagccgatatacttaccttcgctgcgcccttgggcacgtgcgtctggaacgagaacattataaccaaaatcataaaacattttggcaaaaccagccatactatctccatcactcataaagccatgtaataaaattgcggttttttggcatgtttatcaaggtactgggcgaacaaagttatgccgctatcagtttttaaagtccatgttttcttagaaaaatctctaaaccaaaccttatcacgataaagtggatccttgcctgataattctttggagtcagcttttttattaaacggtgtcatcgccatcttgaaaaagtactcgcttgccgcaaacaagccagctccagcaattaatgcggaagacaataatagtttctttttcatcttttaacacttccaaattcaattatttcacttttcattttataattaaattgctgaaaatttacaatccttatgacttaattatactgaaaaatgcgcttaacagacttgcttcaattaatcgatgacctgaacctgaatactaaattttatctaaagcatgatgacaaactacttaagtggggaaaactcactattgccgaaggaaaatgtctgctgctacccgggcaaacagcaatgaccaaacaaaaattgattaaattagttggccgcatgcgtggtcgcggcatccccttgttaatggtcattgaccaaaaagaatattccattttcggcctacagattcgcgaagatactggacaagcaattttaatgtaaaaagtgtctgggaaaaaactaagtctcagatcatgaaaaaagaacgttgaatttttgtttcaacgctctttttgtatacttttagctccagccttgatattattaaatcatcacaaaataaaaacaaaaaggtggaaactaacatgtacaagaattatatcacaggtcaaactgctttaacacttaatctagattttgccattccggccaatcatttggctaatgtcatcagctggtttgtagattcaattccagaagatgttttagtaggcaagactgctaaaacgggccgcccagcctatcatccagccatgatgctcaaaatactgctttttgcttactccagaagagttttttctggcagaaagattgagttgatgctggaagaaaatctgccaatgatgatcttggctgaccagcaaaagatttcatatcatactatcaataattttagatcaagcagccatgccaatgaactgattaaaaagagctttatctacttcactaacctgttagaagatgaaggcttaatcaatgaaggtgctgcttttatcgatggtactaagattgaagctgatgctaaccgctatacatttgtctggcgcaaagcggttgaaaagtatcatgaaaagctgaaaggccaggcagttgaactttatgatgaattgattactaaagaagtagtcaaagaaatggaaaaagaaaaagttcaaactagtcaggggctaaaggaattagctcaagaaactgaagcagaaattaacaagctgactaaagagattgagcaggaaaacaaagccattcctggcggttcacctcgaaaagccaagcgacgtggactaaaaaagattctgcaccggctaagaaaagattatgtgccaagaatgcaaaaatatgaagaagccgaagagatctttgccggacgcaacagttattccaaaacagatcatgacgccacctttatgcatatgaaggaagaccacatgaaaaatggtcaattaaagcctggctacaatattcaagcagtcacgaccgatcaatatgtagttgattatgccatctttcctaatccgacagatttcaaaactttggagccggttttggatcaaatgaccgtgttggacaagtttgacaaaatcgtcgccgatgctggctatggcagtgaatacaattattcgatgctggaggaaaaatatccagacaagaagtactttattccctacactatgtatgaaaaagaacagaccaaaaagtataagaatgatccaactaagctaatcaactggtactacaatgaaaaagatgattattacattgatcatcatggcgtcagattcaatttcaaatattacagccagcgcaaggatcgttctactggtcaggtccgtgattttaaggtttatgaggcagacgagttccagctaacgccagaattggaacaattggctaaaacagctagcggccgccagcgccaagttcgctataatcctaactggcaatatttaaaagaaaaagcaaaagaagttctccaaagcgaagaaggcagacacatctatggcatgagaaaatatgatgtagagccagttttcggacatttgaagaacgtatttggcatgcgcagaacgcacctgcgaggtaaagagaaggtcgaaaccgatatcggaattgcctttatgatgatgaatttgaacaaatattgtcaaagaaggtggctgaagggccgatttttattgttaaaaattttaaagagaacaaaaaaacgatcaagattcttaaaaaaggaaatcttgatcgtttttattcatctggaagctagttttttcccagacactttcttattcttttacgcggtattgacgaatatgatccttagtaccagcaaaataccaagtacctacttcatcgtcgctagttaattctaagccatcctcaggatctaacaaagccgtattgaagacgtcttcatattgcttaactgtcagcttcttccgccgatcaagcattgcttgatcagctgtaggatcaacttgtttttcatatccttcaaccaacttgccactataaaactcagccattgcacctgaaccatatgaaaacaggccaattaatgagccagcaggtaattcaccattctctagcaaactaagtaaactcatataaagtgaagcggtgtagatattacctactcggcttgataattgtttagcagccgcaaaactacgctccaacttgatcattgttgcttgatcttgcccctcaatcgcaatattattagcttttaagcccatcttagtaaaaggtaaatgataagtaattgcatcaaaatcactagtctttaatcctttttgcttcttataatcagtaaaggtcttcttgaagaaatccaagtaaacttgagtcgaatacttgccgtcaactaaagcggtgcgagaataatttggtctccagaagtcgttaatatcttcgctgtaagctgaatgaccattatttagggctaaaatgcttgggtcagctttgatgagcattgccacgctaccggctccttgtgttacctcaccagcagtattaacaccatagcgagcaatatcactaccgatgacaattgcggtttgttcaggatgtacccgaacaaaatcacgtgccatcattaaggatgccgttaaaccaaagcaagcttcctttacttcaaaagttcttacttctggcttcaactttaaggctgtttttacaaataaagaagctgactttgattgatcaatactactttcagtcccaaaaattaatagaccaactttgttcttatcaatcttgtcaataaactttaaagtcgcattaattcccattgaaactgcatcttgcgtaatatccgcaacactcatctctctttgaccaatgccaactaaaaacttattttgatcttgctttcttgcgttcgccaaatcgaccatatcaacgtacttgtctggcgtaaaaagtccaatttgatcaatacctacttgcattatttttgctaaaagctccttagcatgactttcagaataatttttttcactaatcatcgcagctagtagctgcttgcgctcatgttcattatcggttaactcagcaaccacatttctcgcctgcagtttcatatgtcctgcttgaatgccaacagtagaaattgccagcaaagctgctaggttgttggctaaagccacgctaacaataatctcagctagagttttactcgtgattttttgtcctaaaatagcaaaactttgttggacgtcatgacgggccttaattgagccaccaactactccgatcgccattggcaacgttaattcgccaactaaataactaccctgcatcgtccactttgataaactgcgatattggccatcatgattggctaaaactgcagtggctgcttcaattgcccgataatcattgcctgtggcgattaagacggcgtcggctccattcatgattcccttattgttagttaccgcacgataaggatcgtcaattccaatttttcctaatagagcaacacgttgtgcaacttgcatcccaccaatcgtttgtggatcaatcttcactttagccgtggccaattggctaggataatttgataaaatcgcaaataatttttcatcaacaccagcataattttctaatttagccgctaaaaattccaaaatcgagttggttttattcgcgcccatcgcctcagctggatcaaccaatacttttaagtaaagcaaatcctctttctgcacagcagttatttttctagtaccaccaccatgacggactaagctggaaaacttttgattagctaattcgactaagtgcggaaattctttttctaattcaattaatgaaaaagaattgttgaccttcaaaacgatttgaccataaatcccttgtcggtcgctgctagctgtcacaccaccatttctagcaaagatactagctccatgattggcggcagcaactactgagggttcttcaacagccattggcacccaatatttttgtccattgactattaagttttgtactacgcctaaaggcaaacgcaactgccctacaacattttcactcaattcatctagacgtctcagaaccgcatcatcgatttgctctaatgcaataccttcatcctgcaataatttacgtctagcttcaggctctaattgataaaatttcattctgcattctcgatttcataagcaatcgcctgaccgccaccaatacacaaagtaaccagggcacgtctgccttttctcttctttaatccactaattgcactagcaactaagcgtgtacccgttgcacctaaaggatgacctaacgcgattgcgccacccataatattcaatttatcagttggaatttgtaagtcgcgagctaccgctacactttgggctgcaaaggcttcatttaattcgataatatcatagtcatcaaaattacgccccgtcttcttaagcagttttttaactgcataatatggagtataacccatcagtgcaggatcaaagccagcttccgcaaattcacctaacttggcaatttgcgttaagcctaactctttcattttctccttagttgccagaactaacatacttgcaccatcagtcaaaggagacgagtttccggcagtcacttcaccatccgccttaaaaacaggctttaagttactcaatgcctcaagcgttgtatccggacgaattggttcatcatgatctaaactttgaccatcaatctccacatccaggatctcattatcaaaaaatccggatttaactgctacagctgcctttttatgcgactgcaatgcaaattcatccatatcctgacgactaacatgatatttttctgctacgttttcggcagtaattcccatatgcttgccagaaaaagcatccatcaaaccatcgttaagcatagtacttactaggtgatctgctggatcatttttgttttcttttttaacaaaataaggcgcattagtcatgctctcactaccgccgacagctactagatccaaatcgcctagttccatctgtccttgagctagacgtaaagctttcagacttgagccgcagacttcattaattgtaacggctgcagaagcttcactcatccctgaatgtaaggcaacttggcgagccatattctcacctaagccggtatccaaaacattccccataaacagtgcttgaacatcagctggcttaatattgcccgccttcattgttcctttcaaggccattacacccaaatcaattgcagaagcatccttaaaaaatcctcggtacttgccaaaaggtgttcttttagctgcaacaatataaatgtccttcatatattttctctccattctccataatgtgtattttttaacaaatatgataatagcaaaaaaatattaagaaaaacataaaaagactacgccgcagcgtagtctccctaataattaagcttattttttattttgcttaccttcagcttcaaacttcttgctcaattgcatgatatatgcccgcaattgttccttaatttctgggtgcttcaaaccatattcaattgaagtttcaaggtagccttctttgttaccaacatcatgacgttcgcctttaaaggcatgagcaaagacacgttgagtcttgttcattgtatcaatcgcatcagtcaattgaatttcaccgccacgacctggtttttggttagccaaaatatcaaaaatttcaggtgttaataagtaacgaccaataatggcataatcactaggtgctttatcaatatcaggcttttcaacgaatgacttaacattgatcagtcctggcatgatctcattttccggttcgatgacaccatacttagaaacttcttcatgtggcacaggcataactgcaattgtagaagcatgcgtcttgttatagcgatcgatcaattgcttggtcaatggcaccttatcttccattaagtcgtcgcccaacataactacaaatggttcatccccaacaaaactgcgagcacggaagatggcgtctcctaaacctgctggatgcggttgacgagtgtaatacaagttaacgcctaaatcagtaattccttcggttaggcgaagcaattcttttttacccttttcttccaaatcttgttctagttctggattagaatcaaagtgatcttcaattgggcgtttgttcttgccaattacaattaaaatatcttcgattcctgactttttagcctcttcaacgataaactgaattgttggtttatcaacgataggtaacatttccttaggtaaagccttagttgcaggtaaaaatctagtacccaaaccagctgatgggataacggcttttcttactttcataaaagcacactttctatttcaattttataagttcatcataacaaaatatgcatttttcagctacttagtttttcgtcttttcttttgaatataactggcaatacgaccagcagaatattcaacttgtccaacacggtttcgcacaatagcagcgttaacaccaacgccaaataaaaataatactgctgcaatattcaaccagagcataaagatgataaacgtaccaacaatgccataattctcccaagtaatcgggaaatggtgtaaatagaaactaaaaagaaatgatagggctaaccagcctacaacagttacaaaaactcctggccaaattactctctttttgagttttatattaggcaaaacatagttcaaataccataatgctagcatcataaccaatattaatactggatagcgataactaaagattttgctaatttcattaagtggtagctgaaaaatcggtcctaaaaagttgagtacttgttgcccaaaaaccaaggccaatgtagcaattgtaaatactagaatcatcaatcctgtaaaaacaaaagtaatagttctagtccaaagaaaattaagcattgataattttaattcaacttgatgaaccccataaagtctattttctccaagacgaattgcattaaccatatttgataatgaccaaactgcaaacacaataccaaaagaaatatagcctgttgatgtcgttttcaataaagaatttataattggcataatgaattttgacacttggtctggaaaaaccaagttcaaatattcagcaataggcgcagtatcaatgtgaaacaacggtaacacgttaccaatgataataataatcggaaaaatagaaaacaaaatgtagtaggcaataataattgaactagcaaatatctctccttgagataaggtggttcgtaatgtagaaataaattgcccaatttttaaaccaaaatggtttttaccatttttcatccattatcctaatcatccatctcatcaaagtgagggatgtacttttctaagccatcgtaaggatgctgcagggtcaagatcttaggaccatcttttgtaattgcaaaggtgtgttcaaattgagcagcattagaaccatctggagttgcgtagtaaacccaatcatcgttaggatcatcaacagtacgttggtcgatgtgccagtcgccaccagcttctaccataggttcacaagtaatagtcatgccttcacgcaagcgaagaccatgacctgccttgccccagtgaggaacttctggatcttcatgaattgatggttgaataccgtggccaattaattcacgtacatcaccgtaatgattttcatcttcaacataatgttggatagcagcaccgatatcaccaattctgttacctaaaacagcttggtcaattccgagatacattgcttttttggttacttcaattaatttcttatcagcttcggaaatttcgccaactggataagtagtacatgaatctgattcataaccgttcaagttgcaagttacatcaaccttaacgatatcgccttcctttaagatgcgatcttttcttggagtttggtgggcaatttcatcgttaaccgaaatacaagtaccatacttataaccctcaaaaccttgttctgaaaggcggccgccacgacttgatacgaagtcttgacaaaactcttcaattttccaggtagaaatgcctggcttaatcacatcacgtaagccttcaaacatagttgcaagaagatgtcctgaagcttgcatgcctttaagttcacgaattgatttaattgtaatcaaaataatttctcctttataaatttttatttagtttcagatatttctattataccgttttccaaaatacttttaaaaggtcgggtttttgtagaatcaaaacaaaactctagaaatacctgaaatatttttaaagtttgctaaaactaaacgtttttgcaatagtttcatgtataataaggtgtcgtataatgcagtgaaaggtatgaaaaatcatgaaagcaagaattgtttatgccagcatgactggtaacgatgaagacatggctgatattttagaagaagatcttcaagattatggctttgacgttgaaacaagtgatgtcggcttcactgatgccaatgactacttagatagtgatctttgcatttttatcacctacacctatggtgaaggcgtaatgactgatgaattggcagacttttatggggagttaaaagacttagatctaacaggcaaacattttgctgtgatgggttctggcgataagacctacggtgaacacttttgtgaaaatgtttttgactatgaaaaagcattcaaggattgcggcgcaactgaaattactaaacccgtaacaattgaaaatgcgccagatgatgatgcagtcgctgcaatcgatcaagctgcaaaggaaatggccgataagttaaatggctaataacaaaaaagacgtcacagctgttgatcaggcacaaatacgccgtctaggtcaaaaattaatcaagcgacaccgtaatctttgggtttacatggttttcggctttgtcgctgcattaatcaataccttagtcttcatggtcttacactcatggtggcataatgtgatggtaatttctaacaccatcgccttcatcgtctccaacctggcatctttctggtttaaccaaaaggctgtttttatcaataatgtcgatcatgaacacagcacgtggcataaactaatcgtctttttcacttatcgcgtcatcagtttaatccctgatacattaattatgttagtcggcttatcctggctgcatttaaacgcattactagtcaaaattatcgaccaaattttagtcggtgtattcaattacttaactactagatcagtctttcaaaagcaagaacatactatgattgaacgtgcaaaaatgcgcattcaagaaccaaaaaataaaagagacagcaaaaattaaacaatgtcattaagttaagacattgacaaattatcgacttggacttttaagatcattcatttgcgatttatcgcatttgaatgctcttttttcatgccaaataaacccaaatcttgtttagaaattaggctacacgatataaataatatacagctgatttgggtttgagatttcttttgtcttttcgtcctggtctgatcggaattgtgtaatgactaatttgaataagaatctttttaaagatttcagttgaagaagaaattatatacatagcctggatgacaaaacatgactgtttgaaattgatcgcatattgatacttgcattttttttgtggtacatatgcttgagcatcaatttgactgactgcgttaaacataatcatgtgggcatagatctccatttcaataaatctatcctgcttggaatgaaactgtacgctacctaaagcatatttcaactttttgaatgaagtttcaatgccccagcgcaaatggtagatttctttgatcctttttaagggataatcggctctatttagattagttagaacaacttcccattcttctttgcctgatttaggatcattaattctaaatttacaggcacgaaattttattgtacataactctccaaagtcccagctgccatctttggtatttttagaccgatattttatatattgacggtaatgatggttaaccaaatgaacgttttctgtagccttatgggtttcataataataattagaggtagtcacccagcaagctatatccttatcacactcttgattaggcaactcagctacttccttaaatgcgccatatcccgttttagtacgtatgacataataacagttaggcaggcgattacaattttcaatcatgttaaagccggtataacctcgatccatagtaactatatatggtccgcaatttagctttttaagcatttgaacggcggctttacgttcatccatctttgacttaggctgaaagatgcagtcttgataagtattatttaacaggtcatagagtgcattaacatgaatttggcaatatggctttcctttatgattgagatttccaacgatattctctgatttaggattccagatttgattaaaatcagacccatcaatggcaaatatacgatatttatgatcaaataactggatattaaataaattctgattaaatacagttagaatatgcttaaaacatgcgggtgaaagctgacctttgcgttggacataagcggaagtactgactactttatcgttatttttaatagctttttggccaaaagctctaaacaactcactggtcaaatcttttccttgcatattaatagtagttttaatgactgtagctgcatctaaaaaccgcttcctagtgaaggcatgaggatcatcgataaaatcatgaatatgctttccagtatcattgataatttgatcaagacgatctaaaatatttctgtgaagggctttcataattaacaccagctttctggcaataattttgaaggtttaataatttaatcagagggcgaaaaggtaggttcttttcgcctttattttatgcaaaaaaagaaccaaatcataatgattcggttctacagagattagattcaatttgtcaatgtcttaacttaatgacattgaaaaattaaaactgtctctttatttttttactcaaaatcttttggtttactttcactatcttgattaaagtaataataaatatcatccataattcgatcagctgcatgtccatctccatatggatttttggcattcgccatccgatcatattcgtttttgttttctaacaaagctagcatttcttcacgcaccttgtcgacttcagttccaactaacttcaaggtaccggcctttacgccttcaggacgttccgtcgtatcacgtaaaaccaaaactggtttacctaaactaggagcttcttcttgtacgccacctgaatcagtcatgataaagtatgaacgtttagctaagttatggaaatctaccacatcaagcggctcaatcaaatgaatccttggatcaccaccaagcacttcattagccactttttgtactcgtggagataagtgaaccggataaataatttctacatcaggatgcgaatcaattacttgccgcattactttaaatactcggcgcattggctcaccttgattttctcgacggtgcatagtaaccaaaatcaccttattaccaggagtaattgcgtccattacctcatgatgataatcttgttgtacagtctgtgctaaagcatcgattgccgtatttccagtaacgaaaataaaatcagaatggtgattttccttcagtaaattagccttactcaattcggtcggtgcaaaatataaatcggctaaatcatccgtcatctgccgattcatttcttcaggatatggtgaatacttattccaagttctcagacctgcctccacatgtcccaatgtagtttgctgataaaaagtagctaaagaagccgcaaaactagtcgtcgtatcgccgtgaaccaagacaatatctggtttctcttctttgatcaccttagataaatcaatcatcactttagaagtaatttcttctagagtttgattttggtgcataatattaaagtcataatctggtttaattttaaaaatatctagcacttggtccaacatttcgcggtgttgtgcgctaacgaccgttacttcttcaaaacgatcatctttttttagtttcaaaacaagtggtgccatcttgattgcctctggacgcgttccaaaaacagtcattaccttaattttcctcattaaaaaattcctccgcttaactattttactatacctgattttagactatcttgcacccgctttctgtgttttaatggaagtattaaattgaaagttggtcgatgcatgaattcatcattactattattaattacaactggtttaattattttgattggaactttttgccttgtttttggtatggacaaaaacagacccgctaaaactagaaaatatttactttatactgcactaatctgtgttttcctagtttggggcttaattactgcaattatgcttcaacccttaggataataaagataccttttggataaccaaagcatgtaaaaagcctgcaagaccaatacttgcaggcttatttctatgaccccggtgagattcgaactcacctctacggtttaggagaccattgttctatccagatgaactacggggtcaaacctaagattaactttaccaaaaaaagtggtaatagttaacctttttttagaattgtggattaaaaaatgttttcggatggttggtatcagcaatcttatcagctgctttaacaaaaggcatccaaattagcaaagtaacaatcatatttaaaatgcttaaaacaattgcacgccaatcataattgcaagccagaaatgggccaataactggtggcatgatgctaggtactgccacttgaactggattaaccaatcccataatgctaacccaataagaaaaggcaacattaactagtggcgctaatacaaatggaattagatacactggatttagcactacaggcaggcccaagagaattggttcgccaatgttaaaaattcctggagctagtgagattttggcaattgtgcgataatcactgcgtttagaaaacattaaaatcgccacaattagcattaaggttccaccagcaccgccaaaccaggcaaagacatcaaatgagccacgtacccatacatatggtggaatatttccattactaatcgctgtgatgttatcattttgagcagtcatccaaattgaatccaaaattggtgatagaacccctataccattaattccaaaaaaccaaaataactgcactaataaagtaatgacaattaccgtaccaaagccttgtccccactttactaatggagtttgaattgtggtaagcaaccaatttccaaaatatttaccggtaagaatttggaacaaataattaattccgcctacaccaaatattgcaatcattgcaggtaataaagaatcaaaagcagcttgttcagcatggggcaagttcgatgtcacatgcaacataatccttgctttatagcaagcataataaataaaaaagcctaatgagccaaacaaaatagcagtaaagaggccagtagttgagaactgactaatgtcaaatgcattatgcagtgtaacattatcaccatgaaatttaatcttagctatattggcaatgcttagtgcaaaagaagataatgccacaattgaagcagcaagtctatttccttcaaaagcttttgctagttgatagcctaaagccaatgctaagaaaaaggcaaataatgaaaatgttcctcgccaaactaaattactgattgctaccaatggctgtatcgcaaaagcaaaggcataccagcctaaatgatcatgagctgcttcaattaagctcttaattaaaactgctaatgatcctgccattgtaattggcattaatgagacaaatgcatcccgtaaagcaactagccatcttatctgaccccatctactagctagcggcaaaacatagtcctctagccatctaactaaacgaatcatttctttcctttcaagtaatgtggatgatatcccttgttcttattacgtttcttgcgttttttagttttatttttcttagtcgaagtcttaatgggctgctctttagcctgcttcttttccttcttgagtttaggcttttcagttgttaaatgatagcctgcaaagtagacacgctctatttgtaattgatctgccaataatttcttcaaatcacgaaaatcgtgatcatcgcctaaggtaaccacataaccttcagcgttcattcgacctgttcttcctgcccggtgcatgtaagtattagtctcgctcggaatatcaaaattaatcacataggtaaggcctggaatgtccaacccacgcgcagccaaatccgttgctagcagcaatttcgtcttaccagtagctaggtcatttaaggctttttcacggcgttctttaccaaattcattagctaataattcgaacttagtcttagtatgcccaaaaataccagcaaagcgcatcatcgttttatttgaatcaaagaacaaaattcccttaaagtgatccaacttagtcattcgctgcaaaaattcaatcttgtgttgattgtctacttgcaaaaaataatgtttagtcgctgaagcttgttcatttctgacatctactaacaagaaatgacggttaaaaacttgctccgcatcccgtgtaatctcagaatctgttgctccaaataataagatttgactgtctggacccagattttgccctaatgctgataacaattccattttagtaaattctaaaatatcatcggcttcatcaataatcaaagtcttgatctggtttactttaattcgaccacttgagaagaagtcaaaaaaacggcctggtgtagctacgaccacttcaggatgctttttcttcagattgtcttcttgtctctttctattgccagcaccaaccaagctgacgccttttaatcctaaagcgtggatgtaaggattaattgcatgacgaatttgtacagctaattcagtcgttggcgcaataattaccacgctgttagcattacctggctgtgctttttccaaactaggaagtgcataagccaatgtcttacccgtacctgtcttagccaatccaaccaggctcgcaccattgcgaatggcatcatagctttctttttgaattaaagttggctggtccttgtgttctctaattaaaacttgtttgattttttcttgatacattattactgtgttaattgcccatacttttgcttatattgaccaacggtcccgttatacgcgtacatcgttacctggctttctaagcctgaaacattccttacgcgtccgttagtagtgtagcaccaaaatgaatactttaatttattcggtgccttactatctgatgacataaataacgtttgcggattaaagtaatgttgatatttatgatcaactttcaccatgactcttttgccagctgcttgcaataaagccgcaaactgccccattgaccgcaaatatctcgctgaacgagtagtcactgccggtacaattagaattggcagcgagcccgtattttgtcctacttgcttaaaaaaagtagcggtaatgctgcatcggagtcgattcattgctataggaaatctcactaccaaatgccaagttcgttcctaaaatttggtcacgataagacagatagttttcatcaaaatatgatctgccttgggttgctttcaaatatataaaggaaacgccattagattgcaatttatgtaaatcaacatagtcaatatcttgatttaactcaatcccaatcgcacttgaattagcatctggcggtaaagttgtttgccgcttaaaattgaaaaagccaatcaaaagaaatgcaatcgccagaattaataaagtcaaaatcgctggcaaagtatacttatgctgaaatcttttcatcggctaaattcctcccttaattattttaaccgaaaagcctatcaatacaaaaatttccgagactgtaaaatagtttgtgtaaggatgaatgattccttaaatttatttctttaaacattagaaaaaggagttcctttctcgtatgattggtttgaacaaaaaaaacacatacagaaagaagaactccttcatgaatgattttaccaaagattttgctcaagctctattcaatccagacaaaataaatgatttattgcgcaaagagctacaacaggctgttaataacttgctagaagctgagttgactgcctttctaggctatgatccctatgccagaaatggctggaatactggcaattctagaaatggtgcttatttccgcaaggttgatacccagtttggaccaattgaagtgcaagtgcctcgagaccgcaacggtcagtttcatcagcacacgctgcctgactacaagcagcactctgatgttttggaaagcacgattatcaagctctactccaaaggcgtaactaccagagaaatcgctgacttgattgagaaaatgtatggcagtcattatagtccagctcaagtatcaaatatttccaagcagatgctccccaaggttgaggcttatcacaagcgcaagctaagcgacaagtttttctgtgtctatttggatgcgacataccttcctttgcgccgagaaacgtttgagcgtgaagcagtatatattgccattggcattaaacctaatggacataaggaagtcattgactactgcattgctcctagtgagaacattgaagtctggacagagatgcttcaaaacatgaagtccagaggcttgaagcaagttgaactctttctttctgatggtgttgttggcatgaaaacagccttggccaggacttatcctaaagctcattttcaacgctgcctggttcatgtcatgcgcaatatctgtgctaaagtccgggtggatgaccgcgaaaagatcatgaacgaattcaagcagatacatcaacagacaagcaaaaaagaagctgcagctgtcttgcacaaattctatgccagatggaataaagcttatagccatgtcatcaaaggtttgaaggaaattgagcccgatctgctggtcttctacaattatcccaaacaaatcagagcttcaatttattcaaccaatatgattgaatcctttaacaacgtcatcaagcgtaaagctaagcctaaggcagaatttccaactgaacagtcgcttgatgcatttattggcatccaggcaatgagctacaatgaccgctatttcaaccgaattcataaaggctttggtcaggttcaggataccttagaatcttattttgaataaataattaaaaaatcaatttacgagaaagaactatttacacaaaagatttgacagtttcaaatttccagtcgatgtgctaaaatttaaataatgtaaacgaagggcaacaaataaatatgaaacgacaaatctcatttggccaagcattggctaccgtagtcggttctgtcatcggagctggcgtatttttcaagatcggaacaattactgcacaaactggcagcacttcaatgaccctgtttgtatggattttagctgggatcatttcaattgcatcaggtttgaccatttcagaaattgccgccagcttaaaaattaatggtgccattaagtatcttgattacacttacggccgcgtgtggggttttctttttggctgggcacaaatgattgtttattttccagctcaaattggtgccctaagctcaatttttggcgttcagtttgtctccttatttggaattaaggcgaggtattctaacctaatagctatcttgctagtgctttttctcttaggaattaatctaatcggaactaaattttctagcaaaatgcagtcggtcatcactatcctaaaaatcattccaattgctttaattattatttggggattatttaatcctgccaaaatacctgcaccaattattccgttaacagtcggcactggacattcatttccaaccgccattagtcaagggttactttctgcgttattcgccttcgaaggctggattgtagtgactaatttggctaacgaagtcaaaaatccagaaaaagacctttcacgggcaattattttaggtctttcagcaattacattgatttatgttttaatcaattatactttcatgaccgttttacctattgatcaattaactaataacaataatgccgcgtttcaagcttcaatgaaattgtttggtcaatttggtggaaaactagtcactgtgggaattttaatttctgtttacggtgcggttaacgcattcatgctgacagggatgcgcacgccttatatcttggctcaagacaatttattgccattctccaataaaattggcaaggctaatatccataccggtgttccagtagttggcgcgtttattgttgatgctattgcaattgtcatgattctactaggtaattttactgttttaactgacatgctagtcttcgttatgtggactttcaacacaatgttgtcagttgccgtaataattttgagaaagcgtgagccagaattaaaacgtccatttaaggttccatggtatccgatcattccaattatttccgtgatcggtggtatcttcatcgttgtctcaacaattatcaatcaatttgttctttcaattattggtattggtttaacattgttaggactgccaatttactattacatgcaaaagaaaaataattaacgaaaaaagccgccgattttgggtgactttttatttgagtaaatatatttcctgaattgtcaaattaagtgcaacagttaggttatgaagagatatattgcttgaagagttcctctgctgtgtgatattggaggattcggcgatatttgtggttaatggcatcagttgcctgttgaacataagcttttgacttgtctttcatgctcttgcccttagggaagaattgacgcaaaagaccattgcagttctcattggtgcccctttcccatggagaatatgggtgagcaaagtaaatctggcagcccttgatcttggtcatatccgcaaactcagagccattgtcaaacgtgattgatttaaaccaggcaggatgtctgtcaatctccttttgaagcagcctttggcatgtgcttgcccgatagtcaggaatcttgataactacttcaaagcgtgtggttctttcagtcaaagtcattaaagcaggctgattcttgcgtctgacgcctttaaccagatctccttcccagtgcagcggagcttttctgtcttcaatctctttaggacgctgttcaatggaattgccaagatgcttcttgtgcaaagcgtgaccgccatggctgtgatgacgcttgttcctgcgtcttttgagcttcataggcagatcaatattgcttatgtccagcaagccctgatcaatatagcgatagacagttggtgtgctgggacaagggtagcctggcatagtccttttgaattcaccaacgaactcatcgatgctggtggcatcaaatttagctttaaagcgtctggagagcattctcaaaaagacagcataatgcttcaatggattgcgctgatagcagtttttgcgacgcttctcataataaatctgtgcagtatcagcgtaatagtgctcatacaataaatagctgctgtctctttgcaggacacttccgcgtttgatttcgcgactgattgtcgacttatggcagccgacttcttgagcgataacagtacgggaagttatgccggaatccagcattgcttgaatttgtccacgttgtacgctggttaattgatgatagtgcttagaaatgctagaatttgaattggtcataaagatcttcctttcttgatttttcgtcacttcaagtttaggtcttcatggcctttttgtttaacacttagtgttgcacttcaattttaaatccggggagtaaatatatttattaatgttgtgaagcaccgctagttgcatcattttcttgatgatcttcataggcagtattggcagcaattcgaccaaaagtgaaaatatctgccaaggagttaccacccaaacgattaccagcatgaatgccaccagcattttcaccagcagaatatagaccatcaataatttgaccatctttattcaaaacatgtgccttagtatcaattactaagccgcccatagtgtggtgaatagcaggctttctcggagtagcatagaatggtgcaacttcacatttgaggcctaatacattcttatggaagtctggatcctcgccacgatcaacgtaagaattataatcctggatagttttaaccaaaactgctggattcattccaatttgttttgccaaatcttcaagcgtatcagctctaaacaaggttccagccttaacttgcgcatcaagtgactcttgggttgtattgtaagcagtgtccttaatcttatcgtccgcaatttgataaatcaaaccaccattttcgataactgccttagccaaaacatcccgttccgcaaattcattaacaaacctcttaccctttttgttaaccataatatagttagcaggcggagttacaacaccagtgaaaagctcaccggtctttggatcagctactggcattaattggataaagcccataccgaataagtctgcaccagcttcaagacctaagttaatcccatcgccagtaattgcaggtgaattagttgttgtactatcgtactatcgtctgcaatgtttggccaataggtattgtatttttgaaccatcttagtattggcaccaaagccacctgccgttaaaattactgccttagcatgcacagtcaaagtactaccgtcagcgcgtgtcgcaattacaccgcgtactttgccatcttcaataattagtttttcaacacgagtttcaagatatggatcgacaccatgctctcttatccaatcacccaaaacgtgaataaaggcataacctaatggctctactggcttatgacctctgcgccacaaaccaccaactggttctgtaacttgagaattatcaaacttaacacccaaatcttggagccatttaacagaatttaaagcattagttaccaattcatgtaccaaagcatatttaccatgaatttcgttaccttttaaatcagtccttttaccacctaaataagtttgaatttcatggagtaaagtcgaatcaaataaataatctgtaccagaatcaatatattctttgatttgtctttgtaatctttcaaaatcaaagcggtattctaaatcaatttgttcaattggcgtattagccaagtcttctaaagtctgtttttcaccaggaagagccttaaatttactttgccattctggttcagccgcattcattggaccaccagcacggctagtattaccaccgatctgtggatacttttcgagaacagccaccctttcaccatgttgaattgagcgaactgcagctgctagaccagcgccacctgcaccaactacagctacatcaacagtaatttcttcatcttctacctttgtagcagcgggcttttcacggtttttccattcggttgaatcgccgcctgcttcatcaattgcttcggctacgccatcaatcacaccatgactggaaatagtcgcgccactgaccgcatcaacgtttaaagtttgattttccacaattgttttaggcaaacgtctaaatacttcatcggctactcccttagtttcacctgatgaatctactttgattgaagtaactttatcgccatcaatgtcaacttccattggcattgattcggaaccatgacctttagcttttacttgatattttcctgacttcattgcttacacctctaataagtttaattttatccacaagttaatattagtgcgtcatctgttgatgtatcaaatatcaatttcactatactttcataataaaattgttatgagataactatgtttcgttctccaaataaaaaaagcttaatgcaaatagttatccacattaaactttttaattgcatgatttaattaataaactgaaacttgaaagctaagattaacgctccttccccgcgcctcttggctttttcttatcaaaaataaaaacgcaggatctctctgcgttatactttaagtgtcaacctgaaaagtaaaggagatcctacgcaatgaacagtatagaacaaatcgacacagaaaacgataccaaatccttaatttcttcatttattaatctaattggtctagctaagttgactaaacaagtcaactttaagcgtaaatctaccgtttcattaaccatgattatctcttggctgatgtctgtacattttgctcggctttccttattcagagctaagagtgacaagcgtttttccgttagaactgctcgcaatgtacttaacgatggaagaatcaactggcaaaaactattatgcttgattgcagctcggctcattggctgcttcaaacatccgtaaaaagaaacattatctttattcaagcatagttgaggctcaatatcatggacatatctttttattaaagctcgtttttgtctccaaccgtggaaacaagaacaagtatttagttttagctactactcagacaaagcttagacctaaagaaatcatccaactttatggtcgtagatggcaaattgaaacatattttaagacgtataagcaatatcttgctttagataaatctcaagttcaaagctatgatggacaatgtggctatatcgcagttacagcaataacttatgatctattggcctggcaggaaagacaaaatacagatgataagacaatcggagatttattctatctaatgaacgaatccttacctgatattagattcgtagatgcattggtctacttaatttcagaattaaaagagcttaaacagaatagttttgaaaagatagatgaagtaatcaatgactttattaaccaactgccacgattcatacaaattgcactgaaacagatcatataaaaactaattacgtctagaaaagctcaatagtgacaggacttgagcttgattttggtgctttcaagtttcagtatttaaattaagcttcagaggcgcctgatacagcatctgcttcttgttcatttgaaacagtaaaataattataattggtattatccgcagcagtcgtacctgcaacaaaaccagaagcatagctccaagaattcatcatacttggcattgaatcatgaccattagcaccaccaacaatttctcctgcagcatagaagttacttacgggattcatatcattgtcaagaagctgcatttgatcagtagtttcatatccacccaaagttgtgcagaacagaagtttttgttcaattacataatatgtatcgccttcgaactcatgcataaacttcttgtctctaccaaactcaggatcataatctgctttaacatcttcagtatagttatccacagtttccttcagcgtttgataatcaatacctgctttttctgccacggtcttcaagtcgcctttgaccagaactggactcttctcgccaaccaaatcaaagaatgattgaacctcttccttggtaaagccatacttaagcattaattcatagaaacggtcccaggttctttgatccatgacaatgtaagctaccttacccttttgttcagcaatcgcatccctaaaatgcgtataaggtgcagattcgttaactattctcttaccatcagtattaacaaaaatagcccccatatcggtcgcttctttagttgaataagttgttagcttagcaataccaggttcaacttccaatccatgtggatataccttataccagtctaagttacgagtaaccaaattcatatttttggcaaaatcaagataatcaccagttgaagtcattggaccataatatggaatatcagtcttatgagcctgataatcacgtgcaccccaaccaccagcagctaaaacaagtgacttgaaattgacattaattgtctggtgcttgccttcagcggttaaagataccagtttgccagccttatctttattcaacttttcaacacgggcatctaagataatttgtccgccctttttttcaaatgcctcagccaccttagtcactagttcatatgagctttcactaggcatttcaatttgacgatatacactatgttcaactgtttgggtttccgctttttgataagtcaaatttgcaaattcagtaataaagtctactgccttcccaatattgttagctaatagctttgacaacattggataattagtaccgcggcattcacgagtaatatcttgaactagtctatttggcgaatccttctttgccgtttcaccaaataattctgcagaaactttagagccagttcctacaacatttgagccatttaaaatagttgctccacctaaatagccatttttttcaagtacaactacttttttacccatcgaaagagcacgacttgccgccattaacccggccataccggagccaattacagccacatcaacatttagttgcctttcttcatgtacgacttctggcttttttccgtcaagagcaatgttattttcggctaatgcttttttaccagaatctagcattgcttgagtcatcaatgatgccccagaaacagcgtccacgtcaaaactttgattatcaataatatttttctttaatttaccaaaagtttgattaaaaattgcaggagtttccgaattcttggttactttgacatcactaattttattgttttctaagtcaatctcaaaatcaatttgaccattgcgaccatctgcttgagctttaatagtttgtttggtcataaaaactactcctttacttgttctttttactaaaccgcttatattataaccacaatattaaatctaaaaaataaatttaatttgatattttaatagaatttttttatcaaaagcagtaaataaaagcgagtgatcattctcactcgcttgattctttatctaattttcatccttatttattagcgtaatgttgaataacttctggcttcaataccccaacataaggaaggttacgatacatatttaaaaagtccaaaccataacccactacgaattcattgccaacctttgaaccataatattctaattcaacatcggtagttcttctggcttccttatttagcattgcacaacacttaacgctcttagcgccacgtgccataatgtgttctttcatgaatttcaaagttaaacccgtatcaacgatatcttcgacaattaaaacatcgcgatccttcacgtcagttaccaaatctgatactatcttgaccttaccagttgactcaaagccatcaccataactagaaacatcgagaaaatccagttgatgtgctacgtccatttgtcgagttaagtcagtcaagaagtaaattgcacccttcaaagccccaacaactaccggctttttaccagcatagtcctcagttaattgcttacctaaacggacgcacatctcatgaatgtcatcttctgtgaataatttgtgatctataatttggtcaatattgtcgccttttgccatttaatctacccttcaattcaatttacatatattattcctaataaaaagaattataacatctttaaacaaaaaaagcgtcattttcaacgcttcctctgaataatttctaattttcatcctttgattgatcgtctttttgatctttatccttaatcggttcaacgataaaccagcgcataaagccttgttcgatactgtctaaggtaaacttatatccttcaagttcaattgattcaccctttttcaagttaggataatgttccatcatgtaaccaccaatggtaataatatcgctatcttgaaaggccttcagatctgtatggaagaaacgctcaaagtcatataaagtcgtcttacctgaaacatgaacttgaccatccttgtccttgataatgtaatcatctgaaacatcatcaatttcatccttaacagaaccgaaaagctcttcataaatatccttatcagtaacgatcccactagtaccaccatattcgtcaactactaagacaattggtgtgtgcttagaaatcatcaagtgcaagatatcttgaattggcattgattcaggtaccgtgataatagttctaataattcttgttactggtacgttgccatcaatttggctttgttgcacaatgtcgtacgcataaacataacccacaacgtcatctttatcattatcacgcacaactggaaaacgactgtagccttcttccaagtattttttcaaggcataggcaattgtatcagttgaatcaagtactgacaatcttgttctgtcagtcatgatgtccttagcaaccttatcgtttaattcgaaagctctttccatataagttaagtcttctttatcaagcgaaccaccatgaaccgcattacgcgacaacttgatgatttcagattgtgaataaacttcattttcttcatcagctggagtaaagcccatcaattttaagattccattggagctagtatttaatagccaaacgaatggataaacaatcgtatggaaaatatgaagtggcgtaacgatccccatcatcatcggtactggcttgtcaatcgcaatattcttaggcacaacttcagttaagacaacttccaaataagttaataaaactacgcctaagattgcactaactgacttgatgagtgaatcattcattggcgtcaaatggaaaagatcttccaatatggttgcgaatgtatcagccgagaaccaacccaagactacaccaaccaaagtggtaccaacctgagtagttgacaaatactcattcaagttgtgcgtcatatgcaaagcacgacgcaactttttcttatttccttgacccttagcaagcatatcttcgagctgacttggtctagtttgaactaacgcaaattccgcagcaacaaagaatgatgcaacgataaatattaataatgttgcaactaaattagttactatttgagctggactcaaagtattatcacctttttttacaaatatattactaaaacctattttaccatttcttgcctaaaatagtgcagttttacacaagggataacggttttttgtaatttattcgaccaccttgtaaatttcattaaacggtacacgctttggaataaatttaggatcattaatttcagcattcttgtcgatatagccaactgcaattgccattccgacagcttcatcatctggaatttgggcatattctctaaccaattctgggtatgaaaccattgagtgagctggcatcacacctaagccacggttaatggctaaaagcatgatactttgtgcaaaaattcctaagtcaaaaacggaccaagctggagatttcttcggaaccgttaaaaagataattgctggtgcattgaacattgttttattcgcatcattaaataattgaagcttatttctgaaaaagaaactttgggatgcacccatcgtagccatattacgacttggataagtatcccaatctagtgatagcattgaagcaaaatcttcatgtgcaacttctttatcatcaatctttttagctgaagcagccttaaacttgcttaaagcatcccccatcaaaacatatgcacgccatggctgagaattaagcaatgaaggtgattgctgtgccattttaacgattccagcaattgttttttcttgtaattttctattagtaaacttccgcgttacatgttccttttcataaacatccttaaaattcatttttcctcaattcctttttgcttatataataacaatctatattttattatagtaaaaaactgttaaaaagcttaattattgctcttttcttgctttttcttttctgctgcctgtttttttaaataagcactcattgcaagatcattttttcgcatagcaataaacgcagtaatggttaaagttaatccgccaagacaaatcacaagtaagccaatcggaaacaagaagtctgctcccttaggaataaatgatgccttaattacccagcatgctataccaattaacatcaaaactatacccacaatgactgccttagtgttcggtcgatatcttttcataaatgcccttctttcttaattaacattctaacagaaaaagcttagcttcaacgtagaagctaagccgaaaactagagaaatagtcgttaaatttttacatgagagaggggaaagttgactatttaagttcgatagtttgtactttttgggaatgttcaacactgcctttttcaatcggagtaactgacttaatcaggtccatgttggtgtagacaacgatgcagctgtcatcgtatcccttgtctgtaatcatttggaaatccattgtggctaagggttgacctttcttaactttatcgccttgactaacattcactgtaaacggagcaccttttagttcaacagtatcaagacccaagtgaatcaaaaactcaataccttggtcattcgtgataccaatagcatgtttagttgggaagagtgtggaaatactaccatcaactggtgcatagatatgattatccttaggcttgatagcatagccatcacctaacatcttagttgagaagacatcgtcttttacatcagtaattggcataatgtcgccgtcaactaccgcatctacttcaatacccttattctttttcttaaagaaattaaacataattaataacctctggatttctaaaattcaagtaataatatcaacataaagcttgcgagtaataaaccagctgcagtaagtgaaattgcgattattactcgactaacgccatcttgtgtcttcttcaaagctcttgctcgataaaaacctaagatagctaatactacgcaaagcaagttgccaacaaagagctgagcaatcatctgacttcccatcaagaagcgataagtctgtcgattgattaaaaactgcttgtggtttaacaacatatagtagcctagtatgaagtcaacgatagcaacgattgtactaatcgcaatcatcggctgcttcataatcatcatccgaatcgattgaccagaagcaccgcttcgtagtgcaatcatcgcccaaaacaatagtggagcaatgaaaagtacgtatgaataccaagtcaaaatcttcttagtatccaagtgcatgctttcggttattcgatcgataaagttgccaacttttcgtttactaattgcccacattgatctctacatcctctccttgactctgttgccaagctacatattcactaattaccaaatcaattaagaagtacgctggggtaaaggcaaccttcccgctcttaaagtcggcatcatcagtaaaggcaatcgttggaaaataaatgttgtgctgcactaatgaagctaatttattttgcttcaggttagtgaacgaaacatatttgaatttatcattcactagttccaacttagtgatttcctcattgatcgttttattatcacccgtaaacgagataataaacaaaacatcgcctttttgagcaaagcgtcccgcagcttttaactcctctaatgctgatggcaaaacagttgcatgcttgccaactacaaacaattcatgagccaaatattgtgcgattaactcttgttgccaaccagtagagtaaatgtaaattgtccctgcattatctaaatcgcgatacaagctattgaaatcacgttgtttgaaatacttcaacacgtctgaatttactttactaagttcccgcgcaaaattattttcaattttgattggtttttgcttcgattcggctaattcgaccaaatcaaatttaagctcactgtagccacttagtcctagctttttacataaccggaaaattgcggattcggatacataaagctttttagctaatttggctaagcttaatttgctacagtctctcggattatttagaacatattgaactatctgtttttcagaatcattcaacttatgactattgtcatagaccattgatctcaaatttgccataatacctgtgcccttatcaatatataatttatatattaatgataacacaagcgctttcagattatagcaattgtttcatttgatcaacaacttgatcggcatccaatccgacaacgatgtcaacctcgttgttatctttatgttgtacttcgtaagaatctgcgatcttcttgaattctgaatctggagcgaccttcttaggatcaacgacatgagttcttactctagttgagcaagcaatgacatcttgaatgttggagtcaccaccaagcaagtcaacgataccagtagctctttcaatataaggattatcttgttcagttgataccttagcgtcgccaccttgttgttgcattaaagtgttcatttcatcaagaacttgaggtacgtccaaacctacgataacttggatagccttaccgtggtgtacgacattgacagccttgtttgctttaaatgcggcatctgaagcaactttatttggatcggcaacagatacacgtaatctagtagcacatgaactcaattctgtaatgtttgaaggaccacctaataattcaaggtaagcagttgctctttcaatgtaagggtcattagcgtccttaccagcagcttctgcagccttcttagccttgtattctttctttgaaagaaggtgaacatcttgatcatcggcttcacgacctggagtaatgtaattgaacttctcgatcatgatcttgaagacaaagtaagtaataataccgaagataataccaacgataaattccatcacataggtcttccagtggtttggccaaagtggaatccagttcattgaagcgataccgatcgcaccatctgacatgaatcctcttaaaccaaaggcccacataactgtgttcatcgtggctgacaatactgagtaaactacccaaagaactggagcagcaaacaaataagtaaagtcgataggttcagtaataccagctaatactgaggttaaagcagctgggataagcaaagctgaagtttgcttcttcttgttcttcttagcagttgcgtagaaggcaagacagataaatggtactaagaataccttttcgttaccgtaaagttggaatccttcaactgaagcgatttgtgaaagtggtttagtacttgcagcgtattcagcaaggtgtttcaaccagtatggttgcaaaccgccggcaacaacggctggaccgaattggaatggaatgtataccaagtggtgaagaccagtaggaatcaatacacggttcaagaattggtaaatccaaacaccgataaatccactatctacgatgaagtgttgcatgctggtgatacccatttgaacttttggccagccccagcaggtaatgagtgctaaaggaatcattacgaagaatgctaaagcgtagacataagttgaaccttggaaagtaccaagccagtctggcaacttcttatcaaagtacttattgtgtaaccacactacaataagagcaacaaccaaggcacctaagatactagtgtcaagagtcttgataccagcaatgttagttaaaccatggttagtagcgttagcaacaatttggatcttgtcaaagttaggaataccaaaagctgcaccccagtgggtaagcattgcaccgatgaagtagttgtaagtcaagtaagcaataactgcttccatggctgctctacctctagccttgttggctaaaccgattggcaaacctacagtaaacaaaataccttcttggttgaacactgtccaaccaccagctgaaattgtgtcccaaactgagttccatgtagttcccgggttggcaattaaaccaaacagagtcgggttattgaacaaactacctaaagctacgacaatacccgcaaacgagaacagcataactgggacgaacatagcggccccaaaccgctgtattttctgcatcataatcgtttacctctgaagaaaaaaattaaatcaataacttattcttacatctacacctgcatctacatctttatttcatcagatcaagtcaaccgcaaggtgctcatacaattgacttttgccatttgtgcttcacacaaatatttactcctcaaaaatgttttaagataaaacgtccagttgatatcaaattctgaacttaactacgcatggtgctagttaaatcgttttagttagtccaatcttgttagactcgacttgtaaatagtaataatagaaaagagtctgatctgattgaactgtcttaagcttaagcgttttagccaccatttacaagttagttttaaagatttagtgataatttgtcggcactggtatcgtttgtatgcaccggctgagtttactcatcggcgaaatattgatcaaattaaaactacggacagtctgattttggctttacttatctggcaagctaagacaggaattgaatcacaaagaagattctgtgaatgtttcaattgtttatcacactcacgttttaatcggcgttcacgtcagctattgcaattgatttatcagatacggcaagaaatgaataaaaaggttgacctgaatggacatttcttgatcattgacagctttccggtacctgtttgccaaccaattcgcaactatcgtgctaaaatttttcgcggttatgccaacattggttataaggccaccaagaaaatttacttctatggtttcaaagttcatgccattgttagcgatgacggttacattcttgattatgtcgtaacaaaagcatcagttcatgatgccaaggagacagttgaactgctggaaaatgcccatccatctaattactatcttcttggcgacgaaggctatttaggcaaagaactgcatcaacagctaaaacaaatgggttatgaactttggacaccatatcgtaaaaatatgacaggagctaaaaagcacaatgatcatcaattgatggctattcgcagaacaattgaaagcgacttttcgcttctgacctattacaatgccgagaacaatcgagcacgtagtctgataggctttcaaagccggttggaaattgcaattttagcttataatttggcttattgtctagaaagatttaactagcaccacgcgtacttaactctatcttagtagctagcttacatttttatttataccatagttttagaaactgtcaaatcttttgtgtaaatagatctttctcgtaaattgattttttaattatttatttaatcaaagtaggattctaaggtgtcctgaacctgaccaaagcctttatgaattcgattgaaataacggtcattgtagctcattgcctgaatgccaataaaagcatcaagcgactgttcagttggaaactctgccttaggcttagctttgcgcttgatcacattgttaaatgattcaatcatgttagtcgaataaattgaagctctgatctgcttgggatagttataaaagaccagcagatctggttctatgtctttcaagcttctgataacatggctgtaaaccttgccccatttggtatagaagtcatgcaggacagctgtggcttcttctttgtttgtctgttgatgcacctgtttgaattcgttcatgatcttttcacgatcgtcgacgcgtactttagcgcagatattgcgcatgacatgaaccaaacagcgttgaaaatgagctttaggataagtcctggccaaggctgttttcatgccaacaacaccatcagaaagaaaaagctcaacttgctttaagcctcgggatttcatgttttgaagcatatctgtccagacttcaatgttctcgctaggcgcaatgcagtagtcaatgacctccttgtgcccattaggcttgatgccaatggcaatatagactgcttcacgctcaaatgtttctcggcgcaaaggaaggtatgtcgcatccaaatagacgcagaaaaacttgtcgcttagcttgcgtttgtggtaagcctcaacctttggaatcatctgcttggaaatatttgatacctgagctggactgtaatggctgccatacatcttttcaattagatcggctatttccctggtggtcacgcccttggagtaaagcttgataatcatgctttccaagatatccgagtgctgcttgtagccaggcagcgtgtgctgatgaaattgaccgttgcgatcccgaggcacttgcacttcaattgggccaaattgcgtatcaactttgcggaaataagcaccatttctagagttgccagtattccagccatttctggcatagggatcatagcccagaaaggcagtcaattcagcttctaacaagttattaacagcctgttgtagctctttgcgcaataaatcatttattttgtctggattgaatagagcttgagcaaaatctttggtaaaatcattcatgaaggagttcttctttctgtatgtgtttttttgttcaaaccaatcatacgagaaaggaactcctttttctaatgtttaaagaaataaatttaaggaatcattcatccttacacaaactattttacagtctctagttttaagctaatgtaagcgttttttaaaactatgacttattgtttcataaagttaagatgatatttcatttcatgaaacgaaacaagtgataaaacctttttcctttccaagatgaactactttgcttactgaaataacacaaagtctggcataattaacggtaagttaaatgcacaggaggaattattatgacaatcaaatttattgcacttgataccgacggtaccttgcttaattcaacaggtaagattttgcccagtacaaaaaaggcagttaaaacagctttagaccaaggaataaaagttgctttatgttctggtcggccaatcgcaggattaaaacattttatggacgaattaggaattattggacctaatcaatatgctatcactcttaatggcgcaattacccgcacagcagatggcaagataatgactaaagatctagtttctaatcgactttatcgtaaaatgtatgcttttgctaacgagcatcatttaccttttaacgttgtttcccctgattcaaaaataattacaggagatcatgatgttgatttaatggtttatactcaagcttacgaaaatagtgcgactttatacattagagagctagatgaattgcctagtgattttgaaattgctaaaggttgttttgccactaaagctaagttgttagaccaatgggaggataaaattcgccaagaatttgggcaagagctgtatattgttcgtgccgacgattgcttcttagagctacttcaccctaatgttaataaaggaaccggattaaaagaattaactgaaaaacttggcattactccagaagaggtcatggcaattggagacgaaagaaatgatattaccatgtttgactttgctggaacagctgtttgcatgggtaatggctccgaagaagcgaaaaagcatgctgattatgttaccacttcaaatgacgaagatggcatcagcaatgcttttgagaaatttttatgaacaacctaaaacaagtatctgagaagtgattaatctttcctagatacttgttttattatttgttcaaatattcacgcaaagctggcaaaactttctccgcctcaactcgtccgacctcatacactcgtcgcatctcttttttatctgtttctaaagtgccaatttcaagcggaaacggtggacgaataataaaagcttggtcagcagcttcatcttttaccatctgatcaagcaccgcattataatcctcagctttagtagccaatttttttactactgcggggtatttccttaaaattactttttccagtggatagagcttactctgctttttgcgataagacttcggctgtgtagcaatgactacctttttatcacagttttgctgctctaaaaaatcatacggaattgaatcagatacaccgccatcaaagtaataatgcccatgaattgcaactggatgagcaaaaaatggaatcgacgacgaggctctaatccactctaagtcaacataacctgcatcatgtaattgatgataaaccggctcacctgttgcagcatcagttgcaacacaccaaaagtccattggattagtcataaatttttctttatcaaaaacatccaacttatcaggcaaaatatggtaacaaaagttagccgcatacaaattgcctgaccgccgccatgatttccaactagcataatatggtttccccgcaaagcgcatgttgtagcgcaatactcttcccttttgctccgacttcaagtttacgccaaaggcagcaccggctgaaacgccaattgctaaatcaaaggttatgtcattttctaaaaacacatcaattacgccagctgtaaacagcccacgcattgctccaccttcaagtactaacccacttttcatattttccctctttatcaaaaaagacctacgcttttcgcataggtctaatttattcttattttaattttacttcaagcccgaccattgccattcggttacttctggcatgtctttaccattgtcgcggatgtattggtggtgcttttcaagcaagtaatccatgtgactgatgaagtccgcattcttgcccttcaaagctgggatgctttctacggcatccttagctaggtcaaagcgatcaagatgattcaatacccgcatgtcaaatggggtagtaatatcaccattttcttcatagcagtgaatatgaacattgtaacgcttgcgagcaaaccaaatggattccatcatgctcttgtagccatgccatgcaaagattactggtacatccttagggaataatctgtcaaattcttcagttgacaagccattcttgttgtcctttggatccattaacttcataacatcaactacgttaatgtagcgaatcttgagatctgggaacttcttatgcaaaatatcaattgcggccaaagtttcaatagttggctcagtttcagttgaagcaaagacaacatccggcttagcacccttatcagttgaagcccagtcaatgtagcttaagcccttgtcaaccaacttttgtgcttcttcaattgagaaccattgtggacgaggctgcttagaagttaccaaaacattgatgcattctctatctttcaaggccttatcgccaactgccaaaagcgtattagtgtctgatggcaagtattcatgaacaagatctggacggttcttttcatacaagtgagtcaagatgcctggatcttggtgagtgtaaccattgtggtcttgttggaatacagttgaagttgcgacaaagttaagtgatggataatcatgacgccagtattgttccttagcctttctgagccacttcatatgttgagtaagcatagagtcaactacccggccaaaggcttcataagtagcgaagaagccatgacggccagtcaaaacgtagccttcgagaaagccttcatcttggtgctctgacaattgtgaatcaattactcgaccgctaggagccaggttttcatcatttggttcatgaatctctggttcccattgccgcttttgatcgtcaagcaattggaacagacggtttgacttggattcatctgggccaaagccgcggaaagtagttgggttgagcttagcaacttcatccaagtacttagcccattcaaccatgtcttgtgcctccatagaacctggcttgtcaaacttcaaagcaaatttgcggtagtctggcaagttaagccgcttaggatcaagaccaccgttagtgattgggttcatggccattctatgttcacccttagcagtgttttcagttacgatttccttaggtgaaccgtcttcattaaacaattcttccggcttgtagctttccagccaatcagtaagcatatcagcgtgttccatatcgccttgagcaactggaattggaatttggtgagcacggaagctgttctcaattgggttgccatccaagtccttctttggaccagtccagcccttagggcattggaagataatcattggccagtgtggcaaagtagcgtcattgttttcacgggcgtgcttttgaatagccttgatttcttcaatgacttcatccatggtcttagccatttcttcgtgaacctgcattgggtccttttcaccgtcaaaacgaccacccttaaagactgaaacaaagtgaggatcccagcccatgccacggaagtattcggttaattcttgatcgctcatgcgagaaacaatggttgggttagaaatcttaaagccgttgatttgcaagattggcagaactgcaccatctttaattgggttaatgaacttgtcactaaaccatgaagcagctaagggaccagtttcagcttcaccatcaccaatttcaacagcggcaataacatctggattatccaaaacagcaccagtaccgtgtgacagtgagtagcctaattccccaccttcatgaattgaacctggagtttcaggagcagcgtgagaagcaacaccgcctgggaaactgaagcgtttgaatagcttagccatccccttttggtcctgggtaatctctgggtaacgttcagtatatgaaccatcaagatatgagttagaaaccattacctgaccaccgtgacctgaaccctcaatatagaacatgttcaagtcatacttcttaagcacacgattcaagtgagcataaataaagttctgtggtgcaatagtgccccagtgaccaattggcttaggcttaacgtcttctgcaaccaatggggtcttaagaagagggttcttcatcaagaacaactgaccaactgacaagtagttggctgcgcgccaataagcatcaacgctctttaaatagtcttttgagtcataatcaactgccatcttattctcctttgagcatctaagagtgctctttttcatttgttcttttgtttacacttatatcataccaaattatctaaaaagttcaactatttttataattggatcctaccaattaaaaaataagtatttaatttaaaattgcatcccttttttgttgctatatcaaccttttaatgctttgatataagtatttagttgcttaaatactgataagtacagataaacaaatatcaaatactgacataatcagtgcaaaattattcattcatgttagattactaaatggagggcatgagatgacccaagaagaaagattaatacaaattaaacagttacttaaaaaaaagcaccaattatcaactagacagattgcagctcacttcaatgtatcatttgatacggcaagacgagatgtaattcatctaactgaaactggtcaagcaattagagttcatggtggtttgatggaaattaattgcaacagcgtacctgattttttagcaagaaatcaagtacaatcaccggttaagatgaaaatggctagaatggcaaagagatttgttcatccaggtcaatgtgatttcatcggttcatcaactacgttaaagcagctctgtccaatgcttaatggtattgacatgcagatcgtcacgaattcaatcgacaacgcattaagcttattagcaatagaaatcccatcagtcagattgttgggcggcgttatcaacaaaaagcagcgtttcatttattctgaaacagcattagaaacattgcgtcaaatccatttcaatactgcatttattggtggatctcgaatcagagatgacggcgtatatacaccaagcatggctgattccaaaattgtcgaaaccgccgctagtcgcgctaatcaagttgtattagttgccgaaaaatataaatttactaatcaatcctcttcgccatacatgtctgtccccctcaatcagatcgatgtccttattaccgacaccccattgcctgaggaattaaagcatcattttaatccaaaaacgcaaattatacctgttttaaaggagtgatagttatgttcagtctctttaaccaaaagaaacaaagcgaaagtcgtgaagtataccaagatttgaagaatttttataatagtttttttagcaatatctacaatgaaatgaatattggtcgctatcggcagattcgcgatgcaattgggcttgttcttaataagttcgacagtggtgatcatcctcttgaatacactagcaaattggtcatgtatattcaggctcgaattgccatgaatcacctgcatctaactcatgaacagcaagacctaatgaaaaagctaagtgacgctaccaaatatgtaaatctttcttatgtttatctgagtccgctcacttcggtagaacaatttgttaatatttaagtgtatctagaacctgctctagatgaaaaaatgaatccaaaaagaccgagtagctgatctgctcggcctttttatgcaataatattgttaaaagatatagattttttcaaaggaaataattatgacaaaattaccattcaaagttgttgctgtcgatatggatggcactttcatgcatgatgatcaaactttcgatcacaagcgctttgaccgcatcttaacagaattacacaaaaaggggattcactttatcgtttcaagtgggcgcccttataccagattacgcaaagattttgctggctttttaaaccgaatcgacatgattgctgacaatggctcgcttttgcttcaagataatcaaattattagcactcatttgctcacttataaaacaaccttagatctaataagttttatcaaagagcattattccaagagttcaattattgtcactgggatcaacaattcatatacaactattaatgcttctcctagttttaagcagacgatgaacttctattaccccgatcgaattgaagttactgatttagcagcggctatcaatccgcaggatatgattactaaaatcaccttaagttatcaatatgatttttccgcggaattagaaaaagaattcaaccaaacccatgccgagaagattcactgtacttctagtggtttcggtttgcttgatattgtgccttacagcgttaataaagggagcgctctaaaatacttcttacgctattttggtgctaaacccaatgaattaattgcctttggcgacggaatgaatgatgctgagatgttaaaactagccggttacagttatgcgatggctaatgcagaagatcaagttaagaaaatcgccaagtatgaggccccgagtaacaatgatgatggggttttagaggtgcttgattcatatttagctaaagtagagaaataataattactgtaaactaaaaccgtctgaatgagcaaaataaaaaagtagccaagttttcttaaactaattgacttaagaaaacacagctactttttatttacccaaattaacaaaggtattaaagttcatataatgataatgcacgcgcatatttgatacttcaaacggcgtcccatcatccaagaagaagatcccttccattacaccaacaggttcagtcggcttcaaatttagcttctgctgatcttcttcattcgatggttcaacagtgatattcaagaatgacttagtaacggtctttccctgttcatcttccaaatagttaaacaaagacttttgtaaagtctctggctttaattccggcacaattttaatcggcaaatatccagtctcaattaaaaatggttgttcatctaacagtcgcagacgcttgaattcataaacaaaatcattttcatttaaaaataagtcttccgcaatttctttagttgccttaatcacatgaaaatcaagcaacttaatttgttgttttttaccagggactttaaaagaatcagtgattccaagattcgatccatcataacgaaacattgcctgtttgcgcaaatatagtggattaataaaagttccactacctcgctttttaaaaacgatcccttgttgagccaacagctccagcgcacgcttcattgatgatcgacttacctgatagtgttcggctagactgcgttcatcaggcagtcgcatccccttatactgattattcaaaatattctgtttaatgtcatgcataactgtccgataaacataatctgccattattctcgtccttgatctgcctttttaatactatcaataaaccaagttgcaaacttatccaagtccacatctgtcgcaatctccgcattggcatgttcttggtccataaaatccattacgctggcaccataagtatattgcccgcgcaattcaatattcacatttgcctttttcattgtaaacatttccggatgaagcataattccaactgcagtcggatcataaatcttaattcgcggatcaccgtctggttcatgaatgttagagaaaagtgaatacaacatattacccacttcaccacatgtcttaactttatccatttgctctggtgttaaatgggccttatttccaatttcaagtggagcaaccttaactagcaatccactatgaaaaactacctgcgctgcttccggatctcccgcaatattatattccgcaaatgggctatgatttccgtgaccaatattaccacccataattacaatttccgcaatattttctttaacttcaggatattgcttaaaaagtaaggcaaagtcagttaatggtccaatgcccatcagagttattttttctggactacttttaatttccttagccatcaacgttgcagcaagaccaggttcaattaaagaatcatcagcttgttcaaattcaaagccggcaatccctgttttaccatgaaccgaagcagcactaatcattggtgccaccagtggttgattagcacccactacgacaggaaccttagtatgcaaaaacttttctaaatttaaggtattttgcaaggtatatttcagtgccacgttaccccaagtaggcacaatcatgcgcacatcaagttcttgtgcaaaaagactaatcgtcatggcagcaatgtcatcaatgccaggatcagtactgataattaaaggtttcttgttcataaaattatcctctcgtattaagtacttttataatagcaaaaaaccaaccaattaagaaagtggttggttttattctaataattatttttcttttttgggtttaatacgttgaatgtgttcttcttcatggtcacctaatactaatggcacacgctcaaccacagtatcggcatactccagtccgaaccaagatgcagggttagaagataaattctgcagccatactcttgcttcaaccatgaacttttcatagcctgtcaatttagttaatggactaattacgtcgttaacaattacaaaggcgaagtcccctacatcacgacccggtgtagtagtgaattgttgtggttgagcttcaatcgttccatcagcgatcaaatcatgaacaatttgccgcaaataaacatttacactggtttgttttctaaaacctaaatacaactgaacgttaattacattcttagtaccataagtattgaccgcgtattctgcagtatatggctcgttagtaacattaacagttacaaaccagtaagccttagcccgtttaggtctcttatccaaaattgaataaagcatttcgcgcttaatgaatttattatacttaaccttagccatataaactacattcgtagcgtaaactggataatcatcacagtggctcaactcagtcaacatatctgtatattcatctaagcgaacataagcattctgctcctcacgcttatcacggatcttattgccatagaaccacacgtacatgattgccaaaataaaaccagcaattaaaacagtgacgtaaccgccatgcaaaaacttagttaagcttgagaataagaacatcccttcaataaaggcaaagactactaagaaaatgcatcgtattgatagcgcggtaccttttttacccagatattcaaataataagatagttgtcatcaacatggtaaccgtgatggccagaccatatgctgcttccatatgatgtgaagttctaaataagaaaacaattgcaactgtaatgacacagatcatcttattaattgaaggaatataaatctgtcccttctcatttgaaggatagataatattcattcttggtaaaaattttaaactacttgcttcagctactaaagtgaatgaacccgtaatcaaagcctgagaagcaataatagcggcaatcgtagccaaagcaatagcaaacaatcttagactacttggtactgcttcaaaaaatggattgaaatcaccattaccagcatgataattagcattttgtaaaatccagacgccttgccctaaatagtttaaaatcaagcaaacaaacacataaggccaagagcccataatattacttttcccgacatgtccgacatctgaataaagagcctcagcaccagtagttgccaagaaaattgaacctaaaatcaaaatacccactttattagcaggactaaataaaatacgcaaagcatgaattggattaattgcatcaagcaaactccaatcatggcttaagttcataaatccaatgagccctaaaaaagtaaaccacaggagcatgattggaccaaaggccttaccaatcacactcgttcccattctttgaattgaaaatagtaaaaccaggataacaatagtaatcaagataaccatatcttgcgacgaaactggaattacatcaccaaagcgcatatttttcaatccttcaattgaagttgtaacagtcacagctggagttaatgtcccatcagctaacaatgctgctccaccaattaaagctgggataactagccatttagccctctttctaaccaatgcataaagagagaagatccctccttcaccatgattagtcgccttcaaggcaattatcacatatttgaccgttgtcaataatgtaacagtccaaaaaatcaacgaaatggagccaacaattagttcacggttaacattactaatcccaccattttcagtcacaatcgacttcataacatacaaaggactagtaccaatatcaccatagacaataccgatagcaattaaaaggccagtaaaagacaccttttgcttaccagatattttattcataagtttttatcctctatttcacttaaaaattgaaatttttactagtatagaaaaagtctagattttttgcaataaaaatatatctttttgaaaaataaaaaagaagatgaaatctccttcagtcacttaatttactttttcttatcttcgatggtgccatcactatgagcaataattacttcgtcacacatatccaggaacaagccatgttcaactacgccaacagtatgatcaaggtaatcagctaaaccatgaggtgctggaacaggatctgcagccaaatcaataatataatttccatagtgagtcacataacgttgattgccatccatacgccaccgaggctttaatccttcttgttcaaaacgtttaaagttttgttcacaagaaattggtaaaacttcaactggtaatgggaagccgcttaaacgatgcactaattttgattcatcaacgatccaaatgatcttcttagaattgattgctacatttttttctaaagttaatgcaccaccgccgcctttgattccatccaagttatcggtaacccgatcagcaccatctacagttaaatcagcttgatcaatatcggccaattcactaactttaaagcctaagccctcaagttgttttttactacggttactagtagttacgatagccttcagttttaagccgtcttcatctttgcgcttacctaaagcatcaatgaaaaaggcaacggttgaacctgtaccaacgcccaataccatacctgatttaaccatggcagctgctttttctgctgcttcttttttcaaacgatcttgttcttgcttgttcattattcatcatcctccatcgcctgtttaacttcctgttcagttggaattgaaggctgagcacctaaacgttgtacggcaattgaagatgcacgacttgcaattttagctgcttcttcaaagttagataggccagaatttaaattgcttaccaaatatccaataaaggtatctcctgcaccagtagtatcggctgcttcaactttataagtcggtattaattcttcaacatcgggagttgaaatatacgcacccttatcaccataggtaataaccacgttttttacaccaagcatgtgtagtttttctgcattagtggccagcgttgaattatctttaattgcaatgccagtgatcttggcactttcagtttcattcggtgtaatgatatcagtatattgcagtaattctttaggaatctcatcaactgcaggagctggatttaaaatagtgatttttttggcctttttagcaatcttaaatgcttcaagcgtcacatctagtgggatttcgaattgagcaattacacaatcccaactcttaatcaaatcaccagctgcacggatatcttccactgtcagttcataatttgcgccgtgatcaataatgatgtcattttgcccagcttcattcaacgtgatataagcatggcctgtctttgctcccattgtggtttgcacataagttgtgtccacgccataactcttgagctgatgcgtgataaaatttccttcactatcttcacctacacggttaataaagtaagtttcagctccacttttagcagctgcaattgcctgattagcacccttaccgccaccagcagtagtaatgtctagcgcattaattgtttcaccaggcttaggaaagtcttttacatgtaatgttgtatcaacattacttgaaccaataactacaatcttcttcattatgagcatcctcttctaaaaatggatttattcaacctcaattataacaaaaaacgtattcaaaatattgaacacacatttttgaaatcttactgtaaaataccaccattaacgaagccttttaagcgctcagcttcccacttcaatgtatctgaatcgtcaacttgcgagatcttatacccaacgaaatatggtgaagcatagaatcgtggaataatcttgcaacaagtaccttgaccatcattaattggatagaaaaataagttataagaatcaacaccatgtgacaagactgaacgcacatattgtgtgcccttttgaatcaaatcggcccaagtatccaaattagtattatcatgtgtcaaaatatttacttcttggtagccttgaactggacgcgctgataagttcatttcaactgaacccgaacgcccgacttcaaatcctttaaagttatcagcgccaatatcgtgatagccatctttatgatataagcccacgatctgcatatgtggatgagttaaagaaccatcagacttgggaccaaaatttttataccaaagcacactctgataacggcctgaattattcattttttgaaaacacttcaagccaaacttcatcaactcttgattatcttcacgcgtataagttgaaatatctccctggtgatcacttgattcaattaaaattgtttgattagtatcctttaacgtagggtacttattcttcaaccaaatcttatcgccatctttttcataaatattaattagatgctgcacatcacaaaaaggacagccagcattctgatttccttgccgattaccataatcataatcatatggcttacgcttaccaattgaatattcatacactaaaggattcttgtccatatttttcacctgctaaaccaaagatatcatacatttaacatcattttaacaattttatcggttaattgtgaacatttttattaataaagctaggaatagtacgtctatctatgataaactacctttgtaaaagaaatacatgatatacatgagaggaagaatcatgaaattctataaaaaattggtacttactggtgccgcagctttagctgttctaggcttgagtgcatgttcaaataataattctagttcatcttcatctaataagaagattccaactaagattaacaagaagactaccgttaccttttggtattcactaactggtaatgcgcaaagcagtttgcaaaaattgactaaagattttgaaaagaaaaatcctaacattactatcaagttgcaaagccaaggcggcaactactctgatttacaatctaagttggtttcaggtttgcaatcgccaaaggatttaccgacaattactcaagcttatcctggctggctttacaatgctgccaagaacaatatgcttgttaacctaaccccatacattaacaattctgaaattggctggggctcatatgctaagagtggcattaagaaagctctttgggatggtgcaaacatcaacggtacacaatatggtgttcctttcaacaagtcagttgaagtacttttctacaataagaccttacttgataagtatgatgttaaagtcccaactaacatgagtgaattggcttctgcatccgcaaaaatttaccgtgaaagtcaccacaaagtacgcggtgttggatttgatgctttaaacaattactacatgatgcaaatgaaggaaacttacggcaaagacttcaataagaacttaaactttgctgccaaggattccgttaaagccatcaactactacgctaatggagtaagagccggctacttcatgcaagctggtactgaaaagtacatgtcaactccattcaacaatggtcgcgttgctatgttcatcggttcaactgccaatgaagcttaccttaagcaaggacttaagaagggttacacttatggtgtagctgctcgtccaagcacgatgaacgtacaacaaggtactgacatttatatgttcaaaaaagcaaccgcaatgcaaaagtcagctgcgtttaagtaccttaagttcttaacttctaagtcatcacaactttactgggctaaacaaacaggctacatgccagttaatactgctgctatcaacgacaaggtttaccaatctgccaagaacagcaagataccagcaattattgccaagacctctaagaacctttacttcttaccagtaactaagaatgctactgccgcatatgatcaagttaatgctaacatgcaaaccattttagctaaggcaagtaaaaagcaatcatggaatagcgatatcaagactggtaaagataagcttgatgctgcttggaagcaataatttttcaaataaaatatctatcaaaaaaagaagttcagtattaattgaacttctttttttacctaattatttactaaaaatggatattgaatttgatcattatcagttacattcaacttgtaacgagcacgatataaagccttttctaccgctaattgccctgcagttgtggccattgcaatcgaatatgacttgtgtggtgaattgatcaggattggactgatagaatgcttaatgtatgactggattagaatgacataattcgattccttacatgcacgtaaaacattagaagcctgtttcatctcgataattcgagctactccattgtgtgcttcaatcaccttagccaagttagaggttaagctcttgtctcctactacaacggtaactcgttttttatcgaggtcaaaatcaattcgggaagcatagtcttcattttgcttttcagacgactgcttctcctttttttctaattgatgcaataaagacttgtgtctacctttagtcttgtgcttttccgtttctttatttttatccggcttttccttcttttctggaatagtaacttcagcttcggcataacgccatctaaccctaatgaaggatggatcactgactcgccaaacaatactaatcaggtcattttcgtgtaagttaaagtgacttacagtattcatgtctaagtataaaatagctttttcaggatttacttgacttaggtttttgccattagagtcctgcttgatgtataaaccaaaagaatcacggtgaactaccgctggaccaaattcgataatttcctcatctggcgcaaaagactttgcatgatgctcaactttaataattggacgattgccactgtcatttaagtgatctagcaaagtaactgtatcaccgttttccagcttttcaattctagtcaagtgttcattaaaatattgtactgaatgaccattctcatccactgcttctgcacctagcagcttacgcctaatctcatattgtttttcctttggtttagccacaggaattattttcttaaccacaggcttaggaataggagttatggtcgcatatttgtttttattctttaaaaccgtaggactcagagctttagcagcttcttcttttttagctttttctttttcaagctcttccttcgtttttttcggctttattttttctacagtattttcatcattttcttttttagtttctatttcagttttattttctagcttattctcagtttttatttctggctcattttttacagcctgatcagctttttccgcaattttaacgacttcattcttattctcaggtggattgcctagtactgcctggttatatattttactaataattttcaacgcaatcattgactgcttcagtgattggggatcgctccccgtcgcctgcattaaatcaataatatcttttctataatcaatcgtcatatatttaccttcttatttcttaaatatgaatattatacaaaaatttttaatgctaatctaattctttatagatttttatattatttttcctgtaaaaccattataataaaagtagttaaaatatcatttattaaatgagggagactactatgaaaaagaaacttttacttttcgtatcctttttagccggtttattgttcttggtatctacaccaacttatgctagcaagcttcctaaaggctatggtattgctaaaacctttaccacaccaaaagcaacccgtggcacctggtattatcgcgaaaagggtgataaaacaatttctaaggtaaagattactgctcatagcgtagatggtaaaaagctttacgtaccttcacaaaagttcttcgagaaaaatgtttacaacgtttcagctaagaagcgtaatcagttcatcaaaaaaactgaaaatatttatgctgcagctaactataaaaagggcttcaatgtcaacaattgggttaacttagctggtgatggtgaatactacatccctgttactagaactgttaacggcaaaaaggttaaggcattaagaatagctactggtgctggtccttatactgctgcatatgcatacaaaactaaggcattggttaaataatcattgtctaacgaaaaagcaaattagcataatttgcttttttcttttaccgatttttacttttccgtatttctccttcaaaaagagcggtcaattttgccaaactcttatgatcaggatagcgttgaactaattgctcaattttatcggtagctaatttttttacttcttcggctgagcccattttctctaaaaaatctgccaaatcacctgaacgagcaagtaacttacgctcactacgactttctgccagaaaagcttgatcaaccttacgtaacttcaaactaccatctgcattaaagtgatatcctccccacatatgctgcttaattggttgcatcggttcgctatccacataacacaattttcctaccatatggtgcgtctcagtaattcctaacgtaaccgggtcataaatatcgacatagttaaaaattttctcccgcattttagccacctgacgtcgttctgttggcgttaataaaagccaaatattggttccttcatacagataagcagctgcaattgcttctggatgacgacaattagctaaagcaaactgagcattaattgaacctaacgaatgaccataaatataaattctactacctttaaattgattaattgtctgattcaataagtgagcagctgactttaattggctaggaatcgtccgttttcgtgcaagcagtgcttttaaaattggtagattagttttaatccattcatcacgccaagtttgtggagtcccctttttaaaaccatatgatcctttaaataagattgttatttcattcggacttgaaatgacgaaggctcgcatcccatccttagcataaacattacgacaaacagttccaagataatgttgatctattttgatagtatcacccagctgcaattcatcatatgtctttttagttaattcaactcgttcacgatctgttaactgtgcatttacactcataatttttcctaaaataaaaaactaactcttactattatgttagcatgagttagtttttttggataatttgagcctttaatcatattttttctgcaagtaatttgcaatcgttgacaagcagaaacagacaataaagtacatgattgcaataatcacatacattggaattaagtaagtcgtgttctgactgtaaataatttgtgcgtggtataaaagctctggcaaaacaatgatagttgccaatgaagtatccttaaccaatgatacaaattgtgataataatgccggaatcatattgtgcaaagcttgtggcataattacatgatacatagcctgaccatacgacatcccgttggaacgggcaccttccatttgacccgaatcaactgagccaattcctgaacgaacaatttctgctagcattgcaccttcaaagatgactaacgctgcaattgaagctgtcgttggattcgttacaatacctaattgaggtaaaccaaaataggtaaagaagatgatcaacaatagcggcaagtttcgaataatatcaataataaagcctacaattgcagacacatacttaattttcatgtagcgaactaatcctaagattaatcctactacgaagcttaatgcaattgaaattaatgaaacataaatcgttacccaaagtccttgtaataagaagcgaatatcgacccatgaatatgcatgaataaaagtttccattctctatccccttcctattagctgactaattttttctctaaatgacgcatgtagtaactaagcggcaaagtcaagatcaagtagaacaatccaacaataatataagtatcaattgtttggaacgttgagaacgcaatcaattgtgcttgatacatcaagtcaaaaccggcaacaaaggccaaaactgaagagtttttaaccaagttgacaaactggttgcctagtggtggaatcactatcttcatcgcttgaggtaagatgacataacgcatggcttgcacataggtcataccgttggagcgagcaccttccatttgaccagttccaattgaattaattcccgcacgaacagtctctgcaataaacgctgatgtataaagcgttaaaccaattgtccccgcttgaaatcctgacaatttcacaatataacgtggaacgatcaaataaaagatcatgacaattaccagcaaaggtatatttctaaaaatcgcaatatagatcttcgcgatcacttggccaaatttagatggtgctacctcaagcaaggcaaaaatcacgcctaaaatcaaactgaaaactagagcaataatactacttaaaatagtattccaaaaacctgttaggaagctgccccagttgttagtaataatttgccacattatttcaaaaccccctttagactaaaaccaggaattccagcaaaccactttttaatcaaacggtcataagtaccattcttttgtaattcattcaaagcttggtcgatatgatcagccatttgtttttgtcccttattaacagcaattccgtaaggagcattactatagacgccgccgactaacttataaccaggattttcttgagcgataccggcaagcaagccgttgtcagtagttaatgccacaccttggttagccttcaatgcagacattgcttgaccatagtcatcatattgcaaaatccgcgctttaggggcatacttatgtacatcatcaactgcggtagttcctttaacggccaaaacagttttgccttccagatccttaacattcttgatcttactattattaggcactaacaaagatgaaccggctggaaagtatggcttagagaaggttacttgcttggcacgttctggtgtaatagtcattgtggctaaaacagcatcaacatttccattttttaaaagtgggattctagtgttggcagtagtagtaacaaaatcggttttagcatctttacctagcatttgcttagttaaagccttagccaaatcgatttcaaacccttcaatatgtcctgtcttaatgttcgttaagccaaacaatctagtatctgctctaacgccccaaacaattgtcttactttcttttactttttgataaacattattgctagcatgcttgccacaagcagtcaaggcaagtgccaagattagcaataagggaaagaaaaaaaatctttttaattttttcatggcgtgccaccttaatctttagaaatgatcttgcttaagaattgacgtgcacgttcagtatctggatgagcaaagaattcttctggcttgcgatcttctaaaatatgacctttatcaaagaaaattaagcgattgcttacttctctagcaaaacccatttcgtgggtaaccacaaccatagtaatgccttgttcagcaacatatctcataacttctaaaacatcttcaatcatttctgggtcaagggcactagttggttcatcaaataaaatcaccttagggtgcattgctaatgatctagcaatcgctactctttgtttttgtccaccagataattgatgaggataagagtcaattttatcggccatacctactttttcaagatattgcatcgctactttacggttctcatcatcaggacgctttagcacaatcttaggcgccagcataacgttctctaacacagtgtgattattgtagagattaaagtgttggaataccatcccaacatttttacgaatcttattaatatcggtctttttatcagccaaatcatacccagttacaattaattgaccgctattaattggttccaagccattcatagttctaattaaagtactcttacctgaaccagatggaccaataattgaaaccacttggccttcatcaatctttaagttaatatctttcaatgcatggagctttccatagtacttatcaacatgcttaaattcaataattgctgtcatggcttctacctttctttcctttgtctacacaatataattattttactcttcttaaagctaaaactaaatattttagcaattcaaaatagtataatagcctgctaatcttataaatttgttcggttttagcaaaatatatttgtatttagctagattaaaataatcatattaacgctacttacgaatttattaactactaactttcaggataaagaaaaagcccatcatcccctctagtttgggacgaaaggcttttttccgcggtaccacccacattgtctaagtatagaccaactcatgaagcaccgacatgcttcaccggcgtggtaacgtaccggagacgtctcgacctactataagaattgttagttcggtgagctgctaaaagtgtttttcaatagttcagggtctgctggcttttcactaacaccaactcactgctaagaataaactacctactcgtctttttcatagccttttaatttatttatatgtatttaacattatttttcaagaaaatgcaagggaaaataatttaaatcgcaaatgtatccgtttttaattaaaataaatgctgttaatattcggaaaatagcttagaatattagtgatacctagaaaattaaaggagtttgatatgggaaagcttgaaaaacccgttattattggaattgctggtggttctggtagtgtgaaaacaacaatcgcacacgaaattgccgataacatcgatgatcaagatcgaattatgatcatgacgcaggattcttactacaaagacaatactggcgtatcaatggaagaaagaatgaagatcaactacgatcatcctgatgctttcgatatgccactacttgaggcacaattaaatcaattgatgcacagaaagccaattgaaatgccaacttatgacttcactgctcatcccgtagtgatgaaactattcacgtcgaaccagctgatatcattattctagaaggaattttggtactctttaacgaagatatccgcaatttaatggacatcaaggtttacgttgatactgatgatgatatccgttttattcgtcgacttgaacgtgatatgaaagaacgcggccgctcacttgattcagttattaatcaatacttgggcacggttaagccaatgtacaatcaatttattgaaccaaccaagcgttacgccgacatcatcgttcctgaaggcggcgaaaacgatgtggctatcgatatgttaactactaagttgcaatcagttttaagtgaataattatcgagatataacaaacaggcaagctaggaataatacctaacttgcctattttaatactctaaattatcttagtttttcttatcatcctgtgcattagctgcatccaaaatacggttatatttcttagcaaagaataccaaaagcaaaacactggcaataacataaataaccgctgcaatgtagtaagcattagcataaccatcttgcgtattaaacaagtaaaattcagtgaagagaccatcaataactccaacgatagcataggcaatttgaactacaccagtaaaggctggacgcaagtccttgtcaacaataaccatctgaacttcttgctgaatcggcatcgtggcattggctaaacctgttctcaagaaaagcagaattgcgacaatgacgaataagaaggctccgctacctaaccggcgaccattagctaacaaaagcataaccggtacacaagttaatgtacctgcagcaaccgacacgattgcaccgagtttcttttccaaaaatggagcaaagaagtaaccaattagcattgctgcttgaacaaaagtgttgatggtagaagtaacatcacgtggaatgtgcaaataactattcaaataaattggcacataaacggcaactaaacgagcaccaagttggataccggcaatataaacaatccacatcaatgtcttcttgctcaaaagcttcttatacatggccaccttttcaactctgctaggttctttatcatctgcagtagaacgatagtcacgtggtacatcgtgaataaatagggctaagataaaggctaacatcgttacagcagctgtaatataaagtaaaattctgtatgaatttgtatagtcagctaaagtttggccggttaacatttcagaattacctgatagaactgaagcttcgtgataaggaatccctctaattaagccaaagaaccaaacaacagccttcccacctaagaaagtacaaattgtctgcgtaatcaagttaacaatcataacggttgagaacatcttagttctaatcttccctggaacatatgaagtccacatcagtggatacatcaaatcataaaccccaattgctgtccaagaaatagtataagcgatcatgatgataatttgattggttgtgatacaggttaaggccataaaaattgccgtcattggtggcaagatcagcaaaatctttcgatagccccatttatgaaccgtcgcaatcatgactgacatcaaaattgctgtcgccgcattaaaaatgtttaaacctgaaatcaagtgtggcgctacaatcttgtagtaagacaaggctgcatcattcgtaatccctgttactgcacctaaaataccataaatccataagtagacaatgacattgtgtttataacgtggattccaatttttaatcgcctcatcctcagcttccttttccgcattgcttcgtcgagccatataagtccccttccccttttatgaaaacgtatacaaatatctaatttaatcttagcacctatatagtattaataaagtgtgtgtatacgaaaaggtattgattatatgacttaggcaagccttggctttaatgctttatcaaatagattagtaatcaattttactagtacaccatcaaatactaatgatgaaatcatgctgacaataaacatcaaaatttggacattaatttgatagtgactccaaccaaataagaagtagctgggaataaagccacccaaattagcaaaaaaggcaccggtcaagacacttttccaagagaatctttcataacgttcctttttagggaaaaagccaatttcattcattgccccctgaattaatccttcaaaaattgtcaaagctccccattgtccgccgatcgccatttctacagtcgcagccaataattcaccgattgttcctgcacccttagtcggtacaaaatacattgctagtggtgccgccatgtaccataatcctgtaaaaatattatccactactggtgcataacccgtgggcaaaaaactcaatttcaccaagttatacacattattaaaaccataagtgtaaatcacgcccatgattattccaattaaagccactaaaataattgactttacattccattttgacgatctagtaaacataaaaatgctccttactaacatactgtcagtaggagcacacaaataaaagttaattctcttgttagcactttcccttgcgcaagtattatcttgttcaggttcgaagggtattatctcagcattacgcacccctagtgacatttcatttatttatcaattaagtcaagtatagcacattgttaatcaaatgccatttgatctgtgtaaagtttgtaataaaatcccttttctttaagcagtgcctcgtggctgccttcttcgatcacattaccatcttttaacacaacaatcttattagaattcaagatcgtctttaaccggtgagcaatcacaaagcttgttcgtccagcaatcacagtatccattgccttttgaatcttttcttctgttaccgtatctacgttagaagttgcttcatccaagattaggaatggtggattcgttaaaattgtccgagcaattgacattaattgcttttgtccagttgaaaagattgagctagcatcgctaacttgagtatcgtaaccatcaggcaaagtctcaataaaatcatggatattagcctgcttagccgctgagatcacttcatccattgaagcattcggcttaccataacgaatattgtccgctacagtaccagtaaataagacagagtcctgcaggacgatcccaacattatttcgcaatgatgttagttgaatatcacgtacatctgtcccatcaaaggttactttacctgaattaacatcatagaagcgatttaacaggttcataatcgtagttttacctgaaccggttggtccgaccagagccactgattggcccttatcaaccgaaatatttactccgtgcaaaatttctttatctttattgtagccaaaatgaacattttctagcttgacaccatgattcaaaccactaatgaccttaccatttggcacttcgttttcatctttttgttcttcaactgtagctaatcttcttgccccagttaaagctaattgaatcatggaataaattgaagtaatttgcgtcaaaggttggaaataaacttgtgaatattcaacgaaagttacaatcaagcccaatccaatagcctgagaaatttgaccggaaataatcatccaagaccccatagcgatgacaattgccaaattaagtaagttcaatccgttcatcaatgggaataggattcccgaataaaattgccccttaaacaaagcgattcttactttattgttgtagaccttgaagccatcaaccgattcttgacgcaaaccattggtaataatcaccttttcaccattgatctgttcgataatataaccatttaaatcgccaatttcatcttgctgcttatcgatataaacgcgagcttttttcattaaaaggacactaataatcaaaatgaatggtgttgtcgcaatcgtagtccaagccaaagtactattaatcgtgaacatcacaataattgttcccacgaacataattccctgggaaataatttcaaaaatcgcattgttcattgcgttgaaaatattatcccaatcggaagtaagtagcgataaaagtttaccatcctgatgagtatcaaagtagcgcactaacatccgttgaaacttggcaaatagattctcacgcatgtcattagttgaatccgcattgaacttggacattaccatccaagcaataaaaatcgctatctggctcaataagtaaaacaagaacatcgaccataacgcgctatagaacgtgttcatggatgctgtacccttttttaaatcaaccaaataagtagttaaagcagtaactgaacggcctaaatatgtaggtgccataacctgtgcaccactcgaaatcagagaaaggataactacaatagtgattcccttccaataaggcttcaaatacttagcaaaatagcgcaatgcctttttcgtattactcatttattcatttcctcctttcttacctttttgtgtcttgaagatttcttggtaaaccagcgaagtcttaagcaattcttcatgcgtaccttgtgccactaatttaccgtcatctaacactaaaattgtatcggcattaatcactgaaacaatcttttccgcaataataaaagtagtagtatcaggcagctcatgctctaaagcttgctgtactttcttctcactttccgcatccagagcagaagttgaatcgtccaaaattaaaattggtgctttagcaatcaagccacgtgcaatagatagacgttgcttttgcccaccggaaaagttagcagaacgctcctctacttcatgatcgaaagaatcgttataacgctcaataaattctgatgcttgcgccatattggcagcacgctgcaattcatgtaatttagcctgagcattaccttgacgcaaattagatgctattgtacctgagaaaagaactgctcgctgcaacacaaaagaaacagttttgcgtaatgcagcttcagttacatccttaatattttgaccgccaatttttactttacccttagttggatcatataaacgagcaattaattgggccaaagttgatttaccagcacctgttgccccaacgataccaaccatttgacctggcttaatcttaaacgaaatatcctttaaagtaggatcatccccatcaggataagtaaaggaaacatgatcaaactctacgctaccgctaagaggtgcaaccgaaccactttccacaaacttgacatctggttcagtctccaatacctcacgaatacgtccaagagaaatattagctcttgaaaattgcattaaggtcattccggcaatcatgatcgtaaatagcagggttaaaacatagttcacgaatggactgactaccgcaatatcacttggatgtgccgtaatatttttaccaattaaataaacaattaaagcaattacggtataagcgatcatctgaaaagctggcataattgcagagaaccagtaaccaatcacaatgttgtagtcattcaattggtccgaagtttgatcaaactttttaatttcttgtggaccttgattaaatgacttaaccactctcacaccttgcaatgtttcttgtgcttgattagaaattcggtccatcatttcttggaatttggtaaacaaactattcatttgtcttaaaacgtaagcgccaaaaccaaaaataagtgcaaccatgaccactggtgcccaccagaagcgcggaataatcacgatacagaagataaatgaaccgacaattaaaatcggcaaccgcaacatctgcataaatagctgcatcatcatgttcattacctggttcatatcgttgatcaaccgtgtagttagagaacctgctgaaaatttcttaatattaccaaaagagaacgtttgaatcttagcataggtatcttcacgtagatcactaactactccttgtgcaattttcgctgcaaaataaacgttaaaaatacccgaaataattgcaattatacctaggactactagccagattccatcagacaagactgcttgcttctgattcgccatcaatgccttttgaatattttccaataatttaggctgatataatccagaaaacgctgaaactaagatagcaataattgcacaaacaacatcttttttataacgctttaagtatggaagaattattttaaagttttccatttttactcctttcttcacttaaaaaatgccaaaaagtagtgctccattcttctgaaagcttagctaacaatttcattttgtcagttcccatggcttgagccgttttttcctctaactcaaatagaggacgcaacctgtcataagcatatttccgccctgcttcggtaagctggcaaaatcgaactcgcttatcgctaggatcaacagtcatcgtgatatgatcatgatcacgcagaatcttaattcctttgttaatcgactgcttgggtaaatcactcagatttactaattctctttgtgtcaattttccccgaatcagtaattcatacatgattaccactaaatagtcaggcaagtcatgatcctgctcccattggctataagcacggctgccatggataattgatagatttaatttttctgtctcactaattttcattacttcaccaccatatttagtctacatgcataccaaatatattagtatgcacatggactattgtcaaatcattttgtcaaaaataagactataattaaagtaaagaaacaatttttgcatctaaatttcaaattggtataataaaaaaatcatcaagtaaaacaaggcagggattatatgcgtaaaaagtttttattaataatttcaatagtggtcctgtttgctttgccattaagtggctgtaagcaaaacaaaaagcaaaacgtttatcaagcagttaaaactagtaaaaccattaactggggcgtcaaagccgacacgccattattcggctcaataaatattaaaacaggcaaacttaatggctttgaaattgatttagctaatgcattaacccatgaaatgctaggcaaaaatgtcaaagccaatttcataacaacaacggccaacaccaagattcagcttctaaaaaacacgaatgtcgacgccgtcattgcagcaatgaccattacgcctgaacgtaaaaaacaagtcgaattcagtcacccttactttcctgctggacagtcaattatggttgctgacagtagcgccattaaaaatgctaaaaatttgaataacaagaaagtgcttgtagttaaaggaactactgccgccgatgctatccatcaagttgctcctaaagcggaaattttacaattcgatgattacggccaagcttttgccgcattaaaagctggacaaggagatgcctttgtaactgataacggaattttagctgggattttgcgtgatagttccggctataaattagttggcggcacctttaccaaccagccatatggtattgcagttaataaggggcaaaatgacatgctcaagcatatcaacactgcattagcaaaactagaaaagaatggcacatataatcacctagttaaaaaatggtttggcaacattcctggtatgaacattaaagaactagaaaagaagtaagaaaaaggctaagatcaaaattttgatcctagccttttcgcttatttagcaatgaaatcaagtaaagtaaacattacatctttatttttctcaggcacaccatgattaataatctctgtaggcgtttgatgtaaatccttattttctaaagcatatgctccatcattaatagcaatctcacgtacattatcaatttgcggttcaaagtggaactgcaacccaattacattatctcccagtaaaaagccttgattcttaactagatcactagagaataataacttagcttcggttggaatttcactcatttgttcatgccaatgaagagctgttaacttatccggaattcctgtaatagtctgatcttgcaaataaactggtgcccaacctacttccttagcgggtgcatcaagtaccttatagcccaaagttttagcaatctgctggctaccaaaacaaattcccaagatcggcttgtgttgatctaacatttgtctaatcaacacacgttcatttttgacccaatcaagatcatcattaggactgtttggactgcctaggactactaatagatctgtttcatcaacagttggcaaaataccaaaattccctggatggtaaacgaacatttcgttatctctagcatggcaccaggcttgaatagaaccaggtccctcattaggtgcatgctgtaatacattaacgcgcataaaatccctttctcactcaacaatatttttgtttttcattttatactcaattctagtggtaaacaagaagaattcagttaatcttttactatatctttagaaactatatgtcaccttatatgatataatgttatacatatttttacatctggaggacttttatggacaatcaccttaaacgcagtattggcttaggttctgcactttcaattatcgttggaaccattatcggttctggaattttctttaaacaagcttcagttttagatagcgcaggctcaacctttatggcacttttagcatggattttagctgggattatcacattaaccgccggcttaacgattgcggaaatcggtgcccagatgccttatactggtggactttacgtctatattgaaaaaatttacggccgcgttttaggttttatggctggttggatgcaggctattgtgtacggtcctgctatgatagctgcagttaccggttttttaagtattatggtgactaatctctttggcatcggcaccgaatggcgtattcccattggtttgatcactatcatcgctatcggtggtttaaactttttagaaaataaagtcggtgcagcctttgctataatcactacaattgctaagatgatccctatttttgcaattatcttctgcggcatctgctggggtgagcaaaacgctgtcgcccaaactgtgactgagctgaatcgatcaacaggtggtcttggcgtagccgttctcgctgccctttttgcctatgacggttggatctttattgctaacttaggtggcgaaattaagaatccacaaaaattattacccaaagcaatcatcattggaatcactacagtattagtaatttacgcgttaattactattggtatttttagtttcatccctgccgataaaattcatgcattaggtaaaaattcaaccacttatttggctgacgctattcttggtccaattggcggtaaagttctatctgtcggcattattatctcaatgctaggcactctcaatggagaaatgctcacctttcctcgtattatttacgctatggctaagcgcggggatttgcctttctcaagatttttatcatacgttacacctaagggaaaagcaccagtcattgccactatgctcttaattaccttaactggaattatgatgactttcttcgatcctgattacctatcaaatctctgcgtcttcacaatttatagtttctatgttttagcattctttggcttattcattttaagatacaaaaataaggaccaacgtcctttcagcgtaccgttttatcccctaattcctttagtagcaattgcgggcgggctcttcgttttagtcagccaattcttcaatgatcccgctggcgttttgctttttactggaattaccgctgtcggctggccaattttctttttagttaaaaagatgagcaaagcacagaacacgattatcgaagactaaaaatctcaaatttttcttgttcatttttaataattatgatattctaattaaaattaatttaggagattcaattatgatttatcaagacaccacattggcatactcatctagctcaagttccaactgaacttgagtgattttggtgtacgtaaatcagcagccggattcactcaatcgtttctagacgataaggtgaatccggctatttttgtataaaggagaaaaaatggacaacaagcttaaacgcagtattggtttcggctcagctttttcaattgtaatcggaactatcatcggctctggtatcttttttaagcaggcttctgttcttgacagtgcaggttcaactacaatggccttactagcttggatttttggtggtctaattaccttggctgcaggtctcaccattgccgagatagggggcgcaaatgccctacactggtggtctttatgtctacattgaaaatctctatggccgcattttaggctttatggctggttggatgcagatcatcgtgtacggtcctgcaattattgccgccgttgctggttttatgagcatcatgatgactaacttttttggtttgaatcattcatggcgcattcctttggctttaatcacagttttagcaattggaatcatgaatttcttcgaaaataaggtaggtgcaatcttttcagtcataaccacgattgccaaaatgattccgattgctgtaatcaccatttgtggaatctgttggggtcaacaagatgcgattaaccagactgtagcagaggttagccaacacactagtaacttcggtgttgctgtcttagcaactttatttggttacgacggttggattttaatcgctaatttaggcggcgaaatgaaaaatccccaaaaattattacctcgagcaatcattgcaggaattacagctgttttggctatttataccctaattacaattgggattttccgcttcatccccgctaatcaaattcaccaactaggcgaaaacactactacttatctagctaacgcggttttcggtgcaatcggaggtaaaattctttccattggcatcatcatttcaatgatgggaacattaaatggaaaaatgctgacctttcctagaatcgtttatgccatggctaaacgaggagatctacctttttctaaatacttagcctatgttactcctaaaggaaagtcacccgttgtggctactttatttattgtccttttagcccttttaatgatgattttctttgatccagaccacttatcagatctttgcgtctttacagtttattgcttctatcttttagccttctttggaatttttatcctaagcaaaaagaataaagcagagcgtcctttcagtactccactttatccttttgtgcctataattgctattttaggcggtttatttgttttaatcagtgaattaattaatgatccagctggtgttttgctttttgctggaattgtcattatcggcttaccgatcttctacgccgttaaacgcatgaataaacatcgcttgtattaaagcgacttttctacactgtagcttgcacgccacaattcttccattttagctaaacgatgccaatctcctttttgacacattgtatacaaggcatgagcaggatcataagcaattggattgccctctgcttcttttaaataagccccaacaatgctgattaacatcatccgaaagcgttcaatctcattacggctaaagtaagtttcaaaatacttagttactaagcaatcaaccgttgcatgcgaagctttgcgcaaagaagcaggattcttacgatagttatacaaagtataagttgaaattccagttgctttacttaaactagtaatcttaacattacggtcagttattagtttctctgctctttgtacatcggttaaaattttgggatgcttaaagtgagctggcattgggatacgtttacttaattctgcaattaccttttcaacagcttccttcatttgctgcgtagctacttcttcgtttaccttgtcattaagcaattttcctactacaaacgtatgatcagtcacttcataccttttagtaactgcattgtaaaaataaccttcaatacctgtaatcttaactgcatcagttccagcttttgcatagtcaaaaaagatgtgttgctgatcaccagttaatggtgaaaatggcaaattatctagcgtaaaaacttgtacatttaaagtataatctgaatgagcgggatcatctgcatcacaatgatacatcttcacttcccgatcatgaataaaatcttcaaaaataagattttttccatattttttcttcatttcttaatccccttttatatagtcctattatctattataagcaaaaaactagcttttaaaagctagtttttgtttttattagaaaatattcggtttagggcaaataattaccagcagctaagtataaatcgtaccactcttgtctagtcaatcgaatcttggcacctttagcagaatccctaatgtgttgcggattcattgatccaactagcatttgaatatttgcaggatgacgtaaaatccaagctgcagcgatcgcatttttacctacctcatacttatcggccagtttttgcaactcttgattcaacttggggaagccatcattatcaatgaaagtcccttcaaacatgccatactggaatggtgaccaagcctgcacagtaactttgtgtagacgggcataatcaagaaattggctatcacgatcaactgatggtttatctaccatattcatatgcatcccaaagtcaatcattcctgtatgtttcaggctaaattgtaattgattgaacatcaagcgctggctcaagcaactttgtaacaatttaaattgagccgtatcaaaattagatacgccgaaaaagcgcaccttacctgctgcctgtagttgatcaaaagcctcagctacttcttctggatccatcaatgcatctggtcggtgaagtactaatgaatcaagataatctagttgcattctttccaaaatttcatcaacactatgcaaaatatgttctttagaaaaatcataacgttttcctggaacaattcctgttttagattgaataaacatctcttcacgcttgatctgcatttggctaaaagcttgaccaaaaatctcttctgattttccaccgccataaatatcagcagaatcaatgaagttgatcccagcatcataggcggcttgaattgccacttgagcctctggaactgatttttgattcattcgcataatgccaagtgccatcgctggaatgcttaaagtagtacatcccattttaattcgtttcataatgtaagtcctttcattctttatttacctcacatcatgaaccaaaaatagctaagtttcaaccacaagaaattcaataatcttttattaatatatcttagctactgccgattgaattgattctttatctaagaattcgtcataacttgtatcttggcgactaacaatacctttaggtccaacttcgataatgtggttagcaatagtttgaataaattcatgatcatgtgacgtgaataaaattgaacctggatatgaaacaagggcatcatttaatgcagtgattgactcaagatctaaatgattagtaggatcatccatgatcaatacattagccggttcaagcatcatacgtgacaattgacaacgaaccttttccccaccagaaagtactttgatcttcttctcaatttcttctccactaaagagcattcgacccaagaacccacgcaagaaagtattatcatcttgttccttagtcgcatattgccgtagccaatctaagattgtaagttcatcattattaaagttagcgttcaaatcgcgtgacatgtagttaaaggccgttgtttgaccccatgtaacggtaccagtatctggcttaagtttaccagcaacgatatcaagcagcgcagtcgttgctaaagcgttacgcgataaaaatgctaccttatcaccaggacgcacgatgaaagacacattatccagaatcttttcaccgtcaaccgaataagaaacgttctccaccttaactagatcattccctaagtcacggtgcatttcaaactttacaaatggatatttacgactcgatggtttaatatcgtccaaggtaattttatcaagttgtttctttcgagaagttgcctgacgtgatttagatgcattggcagaaaagcgggcaataaattcttgtaattgcttcatcttttcttcttttttagcattttggttagcagctaattcattagctagcttgcttgattcataccaaaagtcatagttacccacataaagctgaatcttaccacgatcaacgtcacacatttcagtacatacttgatttaaaaagtgtcggtcgtgggaaacaacaatcacaatgttagggtaatcagccaaaaagtcttctaaccattcaacggtatgaacatccaaaccgttagtcggttcgtccaatagcaaaatatcaggattaccaaacaaagcttgggccaataagaccttaactttttcgctttcaggtaaatccttcatcatcatttgatgttcttcttcaggaatccctaatgattgcagcagcttagccgcatccgcttccgcattccaaccatcaagttctgcgaacttgctctctaattcagctgccttaaccccatcttcatcaccaaagtcaggtttggcataaagagcatctttttctttcattacttgatacagttccttgtgcccttgaattactgtgtccatgacagtgaagtcttcgaaagcaaagtggtcctggttcaagctggacatgcgctcattgggatcaattgaaattgaacctgttgttggttccagtttcccctctaacaatttaagaaaagttgacttaccggcaccattggcaccaattacgccgtagcagttgcctggagtaaattttaagttaacgtcttcatagagtgtgcggccaccaaatcgtaaactaacgtcggatactgtaatcaatctctttacctcgcttaaaatataaaattatgtttaagtatatcaaaaaagatggtcccttataatagagaatccatctttttaagcaatttattaaaactttttgaagctatctagcttttcctgggtaatatcacgaataattgcagtagctaaatcaactgaagccttaaagtccttataactactgaaacaatatggtgaatgttcatagcgcaccggaataccgatgacaattgttggcgcaccattttcgtagtaaattgcagcaccatcctgaccgccaccggttctaaccgaacgagtatatggaatattatttttatcagctaaatcacatgcatattgttggaacttaggatttggtaaaaatgtcgtatccatatcgcgcaacattgggccacgttttagaccagtttgagaaagccagtcaggcgtaaaagtatcatcagctggacagctttcgagtaccagacaaagatctggcttaacttttctagccgttacataggcgccacgcaagccaacttcttcttgactagaaagtgcagccactacgtcaaagttagtttcttcacccttcaaattatcaagcacatcaaccatcgcaccagcaccaaaacgatcatcaaagtctttaccgaagaataaaccggacttttcatgatattcgcatttaacatcaacaaagatagggcaacctgtatcaatcttgtagtccttgattgtctcctcacggctagaagaaccaacatcaattgacatatctgccacatcaggtacactattgcgctcagctgctgtcatgaagtgaggcggcttagttgctacaacgccagggatatattctccatcacgattgcgcactttaacgcgcaaggctggaatattatattttacccaaccaccaagtggaacaaacttaattaaaccattagggcgaacagcttgcgtaatgaagcctacagcatctgagtgcgcatcaagttgaattaccggtcgatttcccttattttctttcttggcggccccggatttaaaattgaagtgcaacactaagtgttaaacaaaaaggccatgaagacctaaacttgaagtgacgaaaaatcaagaaaggaagatcttcatgaccaattcaaattctagcatttctaagcactatcatcaattaaccagcgtacaacgtggacaaattcaagcaatgctggattccggcataacttcccgtactgttatcgctcaagaagttggctgccataagtcgacaatcagtcgcgaaatcaaacgcggaagcgtcctgcaaagagacagcagctatttattgtatgagcactattacgctgatactgcacagatttattatgagaagcgtcgcaaaaactgctatcagcgcaatccattgaagcattatgctgtctttttgagaatgctctccagacgctttaaagctaaatttgatgccaccagcatcgatgagttcgttggtgaattcaaaaggactatgccaggctacccttgtcccagcacaccaaccgtctatcgctatattgatcagggcttgctggacataagcaatattgatctgcctatgaagctcaaaagacgcaggaacaagcgtcatcacagccatggcggtcacgctttgcacaagaagcatcttggcaattccattgaacagcgtcctaaagagattgaagacagaaaagctccgctgcactgggaaggagatctggttaaaggcgtcagacgcaagaatcagcctgctttaatgactttgactgaaagaaccacacgctttgaagtagttatcaagattcctgactatcgggcaagcacatgccaaaggctgcttcaaaaggagattgacagacatcctgcctggtttaaatcaatcacgtttgacaatggctctgagtttgcggatatgaccaagatcaagggctgccagatttactttgctcacccatattctccatgggaaaggggcaccaatgagaactgcaatggtcttttgcgtcaattcttccctaagagcaagagcatgaaagacaagtcaaaagcttatgttcaacaggcaactgatgccattaaccacaaatatcgccgaatcctccaatatcacacagcagaggaactcttcaagcaatatatctcttcataacctaactgttgcacttaatttgacaattcaggaattatttattttaagaatgttacaaggtatttttgcaggctttgtttctaattccaatgctctagttgcgactgaaactccgaaggaaaaatctggacaagcacttggcactatggcgtctagctttactgctggcaacttactcgggccatttattggtggagccttagcgtctattttctcctatcgcgttaccttctttattacaggtggtctattattaattgcatttcttttgtcattgttctttgtccatgaaacagacttcaagccagtaactgaaaagaaacttgataaagcaagcggagtaattaaagaattacgctcaccgcaattaatctttggcttgcttttaactactctaattattcaagctgcaaataattcgattaacccgatcgtttcactctatgttaaacaattgatggctaaccacggtaatgtcgtctttatttccggggtaatagctgctttgccaggaattgctacattccttgcggcatcgcgcttcggtgcactcggtgaccgaattggaactcataaaattattattgctggctttattggagccacaatcctcttctttttgactgcttttgtacaaaatactgttgaacttggtattttacgctttttagtcggctttactgatgcttgcttgttccctcaagtgcagactttgcttactaaaaatacgccagcaaaaatcacgggccgaattttctcttggaaccagtctgctatgtacatcggtaatattttcgggcctctgctgggttcaactatctcaggattaactaattacagcactgtctttatcgttactgctgggattgttgtcttcaatttgattttgtttagatttaatgtgattaaaaatttgcagtaaaaagtgtctgggaaaaaactaagtctcagatcatgaaaaaagaacgttgaatttttgtttcaacgctctttttgtatacttttagctccagccttgatattattaaatcatcacaaaataaaaaaggtggaaactaacatgtacaagaattatatcacaggtcaaactgctttaacacttaatctagattttgccattccggccaatcatttggctaatgtcatcagctggtttgtagattcaattccagaagatgttttagtaggcaagactgctaaaacgggccgcccagcctatcatccagccatgatgctcaaaatactgctttttgcttactccagaagagttttttctggcagaaagattgagttgatgctggaagaaaatctgccaatgatgatcttggctgaccagcaaaagatttcatatcatactatcaataattttagatcaagcagccatgccaatgaactgattaaaaagagctttatctacttcactaacctgttagaagatgaaggcttaatcaatgaaggtgctgcttttatcgatggtactaagattgaagctgatgctaaccgctatacatttgtctggcgcaaagcggttgaaaagtatcatgaaaagctgaaaggccaggcagttgaactttatgatgaattgattactaaagaagtagtcaaagaaatggaaaaagaaaaagttcaaactagtcaggggctaaaggaattagctcaagaaactgaagcagaaattaacaagctgactaaagagattgagcaggaaaacaaagccattcctggcggttcacctcgaaaagccaagcgacgtggactaaaaaagattctgcaccggctaagaaaagattatgtgccaagaatgcaaaaatatgaagaagccgaagagatctttgccggacgcaacagttattccaaaacagatcatgacgccacctttatgcatatgaaggaagaccacatgaaaaatggtcaattaaagcctggctacaatattcaagcagtcacgaccgatcaatatgtagttgattatgccatctttcctaatccgacagatttcaaaactttggagccggttttggatcaaatgaccgtgttggacaagtttgacaaaatcgtcgccgatgctggctatggcagtgaatacaattattcgatgctggaggaaaaatatccagacaagaagtactttattccctacactatgtatgaaaaagaacagaccaaaaagtataagaatgatccaactaagctaatcaactggtactacaatgaaaaagatgattattacattgatcatcatggcgtcagattcaatttcaaatattacagccagcgcaaggatcgttctactggtcaggtccgtgattttaaggtttatgaggcagacgagttccagctaacgccagaattggaacaattggctaaaacagctagcggccgccagcgccaagttcgctataatcctaactggcaatatttaaaagaaaaagcaaaagaagttctccaaagcgaagaaggcagacacatctatggcatgagaaaatatgatgtagagccagttttcggacatttgaagaacgtatttggcatgcgcagaacgcacctgcgaggtaaagagaaggtcgaaaccgatatcggaattgcctttatgatgatgaatttgaacaaatattgtcaaagaaggtggctgaagggccgatttttattgttaaaaattttaaagagaacaaaaaaacgatcaagattcttaaaaaaggaaatcttgatcgtttttattcatctggaagctagttttttcccagacacttttctattccgcagctttctttgcttcatgatgattataaataaagtttgcaacatacccacaaataattagcaacaacgatacaatcataatttctctaattccggtatgaaaaattgtccgcattgttggcattaacgccttaggcaaactcttcgcagattctgcgtcactcaacttattcatcatggtcatcgtaatattgtggtgtccagcaattccacgtgctagagctaaattcataatcaccccataaacggcagccataatagtttgcgctaaaattctaatcaaaaaactaagcgatgtagcaggtgccatatccttttcaccagcgtcaatctgcacttttatttgaagaataacgaagattgagcctacacctaaaccagataacgctgcaatcgacatcaaaatctgatatggcgtactaattggtacaataattaaaccgattactgttattgcaatcaatgtaaaatcgaaaattaacaaatgataattattaaaatgtctgagtaaatgcggcgtactttgtgaaccagcaatatcaaagattgagttaggaatcaacgtcatcccaccgattaaggccgttgtccctaagattgcctgcgaccacatcggcaaataagtgttaactgcaatatatgcaccccaggcaaaggcaaaaagaatgaagtcaccaactaaagctttattagtaaaaaccgataatggcacgataggactagcagcttttttctcaactaagatgaaccagacaagcattacgatcccgataatcacgaaaatagccactagaaaattactagctagtcctaacatctgaattccaatcaaaaagcaagtcaaaccgccaattagggtaaaagcacctagtcggtcaaagacagtattgatgtttggcttacgaatgccacgataaaaaagaaaactcaagataattgataccaatcctaatggaacattgatataaaagacccagtgccaggacaaagcatcaacaatccagccaccaactagtggaccagcaatacaagcggccgaaaaactagctgcaatataactcaagatgacagttctacgtttaatattcggataaatataaccaacaatcacataaggaagagaacccattccaccagcaccgacacccatcagtactcgagaaacaaggaaaaagtaaatatcgggagccactccttctaaaactgaacctaaaataaataaggctagtgacagttcgaaggcaaatttgttacccattctttcaccaattttactccaaattggcactgagaccgacattcccagtaaaaaacaggcaacaatccaccccatatactgaattccgtgtagatcggacacaattgctggaatcgccgtattaataattgtcgcatctagccctgacataatattagccagcaacaaagacaaagtaaccattgatatttgcttcttagtcatttaatcccacctttttaactctaaaaactactattactcatagtatgcaagatttaactagcaaaataaagcacaatatttttccactaaatcttgacaatctgtgtttttccgagttaaatataaagaaaataatagtgatgacctttaaagttagtcccgtgaggctaagaaggaaatctgcacaagctaatactttttgtcgttagctaatacagaaggaccatcttgagccatgcgctcttggtggtctttttcttttggtcatccagaaaggaaaagctatggcaaaagaaataatcgatgctttaagcatgaaacgcgccttgatgcgaatgacctacgaaattgtcgaacgcaataaaggtactaaagatcttgtattagtcggaattaaaactcgcggttggtacttggctgagcgaatcgccaaaaatttgaaaaacttggaagatgttgaagtccctgtaggggcaattgatatttcacaatatcgcgatgatttaccagaggctgagaaggaaaagatgatccacagccaacaacttgacttcgatatcaccgataaaaacgttatcttagttgacgacgttcttttcacaggtcggacaattagagctgcccttgatgcgttaatggatcaaggccggcctgcaaaaattaatttggctgttctagtagatcgtggtcaccgcgaattaccagttcgtcctgattttatcggtaaaaatattcctaccgcaatgaatgaaaaagtccaagtctcaatgaccgaagtcgatgagaaagacagtattgaaatcgttaaataggagttttaaatgaataaaaaagaaaagtacagaaaccctgaggctatcttagacgtttatgaaaagcctgaatttggccaaggcgtactgctatccttacagcatatgtttgctatgtttggttctaccgttttagtgccaattttaattggaattaacccaagcatcgctctactttcatcaggaatcggtaccttggtccacatgctcttgacccacttcaaaatcccagcatacctcggatcaagttttgccttcgttgctacaatgcaagccttaatgaaggctgatggctacccggcagttgcccagggtgcgatcgcttctggtttagtttacgtagttgttgcgatcatcattagcaaaattggttcaggctgggttaacaaagttttaccaccaatcgtagttggaccaatcatcatcgttattggtttgtcattagcaactactgccgctaatgacgctatgatgaataattctaagtatgatttgacttacttcggtgtagctatcttcactttggtcatgaccttagttttccaaatgtgcttcaaaggcttcaccagtttggtttcaattatgctaggaattatctgtggctatatcttatcctgctgcctcggaattgttgatttctctggcgtggaaaaagcagcttggttcacattgccagcacttgatgtgcctggaatcagttaccacttcaaatggtatcctgccgctattttagccatggcaccaattgctttcgttacaatgacggagcacatgggccacattatggtattgaattcattaactaagcgtgacttcttcaagaatcctggcttacacagaacgatgatgggtgacggtctttcaacgattatcgccggtttcattggtggtcctcctaccacttcatacggtgaaaacatcggtgtgttagctatgactaaagtttactcagtttgggtattagctggtgccgctgtttcggccattatcttcagttttgtcggtaagcttgccgcattgatcgaatcaattccaatgccagttatcggtgggatctccttcttactctttggtacgatcgcatctaacggtttgaagatcttagttgatgatcaaattgactttggtgaaaagcgtaatatgttaattgcttcagtcattttggttatcggtatcggtggtgcttacctacaactgggcaatttccaacttacctcagttgccctttccaccattatcggaatgcttttaaactggattttgcctaagaaagcagctagtgaaaaggctcaagaagaaaagattaagaaagaaaaacaagaaggtaaaatttaccaatagatagaataagccatttaaaacccgttagttatcgcaatgatagctaacgggtttattttttactctcactttgcgcacacaatgttgtaagttgtgcgaaagttggcaaaagttagtgtaagttaattgtaaaagcttaagaagctaacaaagccctatatatcaaggcttcgagctactttagtaaaaactttgctctcactttgcgcacgcaatgttgtaagttacgcgaaagttggcgaaagttagtgtaagttgcgagagcaatagtatataatttattgacacaaataaatttaagtcatgaggtgacattaaatggactttttaaacttcaaagcaattacacaaactggtaattttaaaacaccatctgaaaatgaaaacatcgaatacaaagaagctagttggaaattacctaaatcattttgggaaactgttagctcttttgctaatacttcaggtggaataatgagactgtaaaatagtttgtgtaaggatgaatgattccttaaatttatttctttaaacattagaaaaaggagttcctttctcgtatgattggtttgaacaaaaaaacacatacagaaagaagaactccttcatgaatgattttaccaaagattttgctcaagctctattcaatccagacaaaataaatgatttattgcgcaaagagctacaacaggctgttaataacttgttagaagctgaattgactgcctttctgggctatgatccctatgccagaaatggctggaatactggcaactctagaaatggtgcttatttccgcaaagttcatacgcaatttggcccaattgaagtgcaagtgcctcgggatcgcaacggtcaatttcatcagcacacgctgcctgactacaagcagcactcggatatcttggaaagcatgattatcaagctttactccaagggcgtgaccaccagggaaatagccgatctaattgaaaagatgtatggcagccattacagtccagctcaggtatcaaatatttccaagcagatgattccaaaggttgaggcttaccacaaacgcaagctaagcgacaagtttttctgcgtctatttggatgcgacataccttcctttgcgccgagaaacatttgagcgcgaagcagtctatattgccattggcatcaagcctaatgggcacaaggaggtcattgactactgcattgcgcctagcgagaacattgaagtctggacagatatgcttcaaaacatgaaatcccgaggcttaaagcaagttgagctttttctttctgatggtgttgttggcatgaaaacagccttggccaggacttatcctaaagctcattttcaacgctgtttggttcatgtcatgcgcaatatctgcgctaaagtacgcgtcgacgatcgtgaaaagatcatgaacgaattcaaacaggtgcatcaacagacaaacaaagaagaagccacagctgtcctgcatgacttctataccaaatggggcaaggtttacagccatgttatcagaagcttgaaagacatagaaccagatctgctggtcttttataactatcccaagcagatcagagcttcaatttattcgactaacatgattgaatcatttaacaatgtgatcaagcgcaaagctaagcctaaggcagagtttccaactgaacagtcgcttgatgcttttattggtattcaggcaatgagctacaatgaccgttatttcaatcgaattcataaaggctttggtcaggttcaggacaccttagaatcctactttgattaaataaataattaaaaaatcaatttacgagaaagaactatttacacaaaagatttgacagtttcggaataatagtattaggcatagcagaagataagaataaacatgaatttagtataactggtgtagacaatgttgaagacattgaaacacaaattttcaatgataataacaatatttcatgccttaatcgacctgtaatccaaaataatgatgttcagatttctttttttcaaaataaaactattattcaagtaataattcatccagaaccctttaatactcgtccaataactgcattcggtaaagcatatattagaactggtgacagagatcgagtagctactaaagagcaacttaaatattttacagttgaaagtcaaagcgagattgatactcacttactaccttcgacctatacaatagaagatctagatgcagaaagtatcaaagaatatcgcaaaataattgaagaaaaaggtattattaatactaattctcaacttagtgatcaagaattcttatattcaattggtgttttcagaaaagatcgattaagtaattcaaatgaatatcatcttacagatggtggtctccttttctttggaaaatatatttcgataacagatcgtttcccacgttttcaattagactatcaacaatataatagcgataattctaccaactggaatgatagagtttctgcaggtgacatgaattatcccactttaaatatcttttctttttataatttagttttagctaaaatagaaacaaatatacgcatggtgctagttaaatcgttttagttaataaaaaagtccaatcttgttagactcgacttgtaaatagtaataatagaaaagagtctgatctgattgaactgtcttaagcttaagcgttttagccaccatttacaagttagttttaaagatttagtgataatttgtcggcactggtatcgtttgtatgcaccggctgagtttactcatcggcgaaatattgatcaaattaaaactacggacagtctgattttggctttacttatctggcaagctaagacaggaattgaatcacaaagaagattctgtgaatgtttcaattgtttatcacactcacgttttaatcggcgttcacgtcagctattgcaattgatttatcagatacggcaagaaatgaataaaaaggttgacctgaatggacatttcttgatcattgacagctttccggtacctgtttgccaaccaattcgcaactatcgtgctaaaatttttcgcggttatgccaacattggttataaggccaccaagaaaatttacttctatggtttcaaagttcatgccattgttagcgatgacggttacattcttgattatgtcgtaacaaaagcatcagttcatgatgccaaggagacagttgaactgctggaaaatgcccatccatctaattactatcttcttggcgacgaaggctatttaggcaaagaactgcatcaacagctaaaacaaatgggttatgaactttggacaccatatcgtaaaaatatgacaggagctaaaaagcacaatgatcatcaattgatggctattcgcagaacaattgaaagcgacttttcgcttctgacctattacaatgccgagaacaatcgagcacgtagtctgataggctttcaaagccggttggaaattgcaattttagcttataatttggcttattgtctagaaagatttaactagcaccacgcgtacaaatatacctgatccatttattcaaggtaatgaccttagtagaacgtcctatcacaacgatctaatcatcgcagctaaggaagccctagtcaattgtttaatgcattcatattatgatggtatggtaggtgtaaaaattgtagatagacctagttactttgaatttacaaaccctggtactatgcgcgtaagtaaagaatcgtttttacgtggacaatattcctccattagaaatactgaaatcgctagtttattcagacgaattggtgtctctgaaactgcagctagcggtggtccaagaattcttaatactgtgttgcaaaataatttaaatgatcctgaaattaacattgattatgaaatcaatactactcgcattcgtatttttaagacttttgcaattgataatcaggaaaaattaactgaaccagagaaatttattatgtcttttgctagcagaaatcctaatttttcaataaatgatattgttaaagatccgcagaatcattttggtaaacaaaccacgattagaaaatatgtaacttaaacttcccacacgcaaaattgcttgtttcattgtgattctgcgtgttttgacaaatataaaaggcacaagtccttttcattgctataattatattgaccaaaacataatttatttgcatgaaaggcttgtgccaatgtctattttaccatctcctgaccaacaaaatgaacaactattttcaaactcaatcatcagcttcatcaagaagtttcaggtgatcaagctgttgagaaaatgtggcttccgcaaggaaaaaggcattagcctgttcagcttgtttctttacgttttaagcaatgtctttcgtgaccgcagcttatatatgcagctgaaaatggatcattttcaagaaaatttttccaagaactcatattaccgttttatgcgcaacgttcacgtcaattggctccacttcaccacacttctgtctgcgcaaatcattaataaccacttgcgatctttgacttcagaaaaacgggctgattgctttgttgtcgatgattcctacttctctaggaccggcttcaagaaaacagaattagtcgccaaagtttttgaccatgtatcaatgacttacaagaaaggttttcgcatgatgaccctgggctggactgatggagcttctttcatgccaatcaattcagtgctgctgtcttctcagaagctacagaatatgattggcgaaaataaagtttttgatcagcgcaccattgctggccaaagacgtatgcttgcccggactaaaggcacagacgtgatggttaatttaatcgaccaagctatgaaagcaggtcatcaagccaagtacgtgctgtttgacagctggttctcaaatccacatcaaatcgtccagctcaagcaaaggaagctggatgtgattgccatggttaaggttagctccaaaatcaaatatgaatttgagggagaacgcaaaaacatcaaacagatttatcgcagctgtaaaaagcgatgcggccgttctcgctacctgctgtcaatcccagtcaaagtcggacgccaggacaaagacggtgctaaaatagatgcacggattgtctgcgttagaaaccgtgccaatcgcaaggattggctggcaatcatttgtaccgacatgtcgcttagcgaagatgaaattatccgcaactacggcaagcgttgggatattgaggtttttttcaaaacttgcaaaagttatctaaaactaagtacggaatatcatggcctgtcttacgatgctttgaccgctcatgttgccatagtttttactcgctacatgcttatgtcagttgccaagcgggacgatgaagatgaacgcacgctaggcgagctgttctattgcatgattgatgagctggcggacattacttttagccattccttgcaattgattactgatgcaatgctggccagcgtaaagcaagtctttcatgccagtgaagcacaaatagctgaattcacggctgactttatcaatcgtttacccaaatacatgcaaaaattgttaaagaaaactagcaaaaataatatagaagcctaaagccaagcaagatcaagagattactggcttatttagtgtgggaagtttaagtatgtaaattcattagtagagaagcatttactatccaatgagaaaattggcaaaaaatatatctacaatttacagaaaaacaatgattatctaaatcgcgttaagcaccttaaacatcttgaagataatttactcaaatagatcattcaaaaagctcaacctacaaaattcatgcagattgagctttttcatcttatttatcttcaaatattctaggcttatcgtcatcaagtgaaacatgcggaatttcggtgttatttgtctcaacttgatccttctcagacaattctgccttcattaactcacttttggctttactagaagtattgcctaaaagtaaagttttctcctgcggcgtattcaccattgcctgtttttctttgaattttttataaacaatcgccgctactgcaccaatagctccagcaacaccgataattgtgccgattaatctcatctttttcatagggatcacctcgtattttgaaatcactttcttattcttaattatatctaattatgaggttgaacacatttttaatgcctattacctaaaactttccgcaatttccggatccatctcatcttctaaaacactgtagccttgatccaaagtcttgatcaatgccatatcctcatcatctagttcaaagtcaaacacatcaaagttttctgctaatctagccttatgaactgacttaggaattactacataatttctttgcaaaaaccatctcagcatcacttgagcagtagtcttatgatgcttttctgcaatcttttgcaagacaggattagtgaaaatgtggttggctccttctgcaaatggtgcccaggcttcaggttgcacgccctctttttccatatattgctgtgatttccattcttgattccagacattagtctcaatctggttcacagccggctttacatcattaaaagtaatcaaatcagctaagcgttcattccaaaaactacttacaccaattgcccgaatgcgtccctctttatataaacgttctaatgctcgccaagtgccatagtaatcgttatatggcttatgaatcagatacaagtcgatataatctaactgcaactttttcattgaatcatcaaaagcttgcaaggtatgatcatagccatacttatcgacccagatcttggaagtgacgaaaatatcctcccgtggaatgctgctatgcacaagtgcatccccaactgcctgttcattgccataaatttgcgcagtatccacaagtcgataacctacttccaagccgttttctacaacttgttgagtttgagctaaatcatcaatttgataaacgccaaagcccaagcgtggcattttgacaccattatttaaaattacatagtctttcatatttcttctcgttttctagttaattattgctatttaattttattttaacatagcccatgaaattcgactttatttcgtgaaacatagatattatttcttaaaattaagcactcaagaaaagcctaaccagcatccctcaacggaattgccagttaggcttcttttatttttcaacttttgcttgataaaatccaaagctcatctgcttcaacattctagtaaaactatcaatgtctagctttttaccggtagtcaaagcttcaaattcaccatcaggatcaaccaatttgcggtcagtcctgtgaaatccatttctttcatagaatttcaggcgactaacacgctgcttataatttttcgccttcttggtaactggctcaatatcaatgacaatttgcttatcagggaatcgatcctctaacatcatcaagatcttggaaccataaccttgtcctcgcaatttttcattaatggctaaataggtcaaatagactgtattatcattctcagcataataagtaatgccgcaaaactgaccatcattataaattgcgtgaaacttaacatttcggtgtaatgacattgctaaaagagaaaacatggagaatctttcccaagctggaaaagccttcatatataacttcttagcgtcacgatatgcttttgtgccccatcgggcgggtttagagtctaaaatagtatccttcttttctaattaaaaattgattgttaataactctgaataatattattatacaaaactttttagctttttggaaactgtcaaatcttttgtgtaaatagttctttctcgtaaattgattttttaattatttattcaaaataagattctaaggtatcctgaacctgaccaaagcctttatgaattcggttgaaatagcggtcattgtagctcattgcctggatgccaataaatgcatcaagcgactgttcagttggaaattctgccttaggcttagctttacgcttgatgacgttgttaaaggattcaatcatattggttgaataaattgaagctctgatttgtttgggataattgtagaagaccagcagatcgggctcaatttccttcaaacctttgatgacattgctataagctttattccatctggcatagaatttgtgcaagacagctgcagcttctttttggcttgtctgttgatgtatctgcttgaattcgttcatgatcttttcgcggtcatccacccggactttagcacagatattgcgcatgacatgaaccaggcagcgttgaaaatgagctttaggataagtcctggccaaggctgttttcatgccaacaacaccatcagaaagaaagagttcaacttgcttcaagcctctggacttcatgttttgaagcatctctgtccagacttcaatgttctcactaggagcaatgcagtagtcaatgacttccttatgtccattaggtttaatgccaatggcaatatatactgcttcacgctcaaacgtttctcggcgcaaaggaaggtatgtcgcatccaaatagacacagaaaaacttgtcgcttagcttgcgcttgtgataagcctcaaccttggggagcatctgcttggaaatatttgatacttgagctggactataatgactgccatacattttctcaatcaagtcagcgatttctctggtagttacgcctttggagtagagcttgataatcgtgctttccaaaacatcagagtgctgcttgtagtcaggcagcgtgtgctgatgaaactgaccgttgcggtctcgaggcacttgcacttcaattggtccaaactgggtatcaaccttgcggaaataagcaccatttctagaattgccagtattccagccatttctggcatagggatcatagcctagaaaggcagtcaactcagcttctagcaagttattaacagcctgttgtagctctttgcgcaataaatcatttattttgtctggattgaatagagcttgagcaaaatctttggtaaaatcattcatgaaggagttcttctttctgtatgtgtttttttgttcaaaccaatcatacgagaaaggaactcctttttctaatgtttaaagaaataaatttaaggaatcattcatccttacacaaactattttacagtctcgctttttgacataatacttatcttccattcaaaatttaagtatgcattaatattatttattttagtaaccagtcaatgacattaacttggctaattccattatcatcataacttcccggatcttcggtaagtaatatcttagggtagttatccttaatctctaaaaaaggtgctatttctctttgataagttttttcattctgaaccgttaaactaacttgatagtattcccgaataccatcgcgaatagcaacaaagtctacttccttttttcctaaatttcccacatacacttcatagccacgtctgattaattcaagatagattatgccctctaatctgttccccatattaggacgcttttgccccaacaacgctcttcttaatgaaggatctaccatataatacttattgttaatttgtaaatactttttaccagcaatatcataacgatcacagcgataaaataaatatgaatctaccaatttttctatatacgccatcactgttgcgcttgtcgctttaacgccattattcgatagcacattcgctaccttagttggagtaattaaattgccattagtatcggtcaaaaaagctgcaatatgttccaacaaggtagtatttcctcgttgcattctagctaagatatccttaaccaagacagtgttaataattccttgaatataagacagataggtattttcatcctctaattcagtagcaaaagggaatcctcctcgctctaaataacgattaaaagcttcttgatgggataactcaggaactgaggctaaaaattctttaaaagaaaagggatatacagggatttcaatatacctaccagccaataaggttgctaattcacctgaaagcataaaagcattcgatccagtgacataaagatcaacattttgcttgataaaaaggctatcaatagctttttcgaaatgagggatgtcttgaatttcatctaagaaaatataattcattttatctggaatcaatcgttgatcaatatattgatacaattttaaataatcagtaattgtagcaagccctaaatcttcaaaatttaaaacttgaatttgttcctgcttaacacctgctttaagtaattgttcctgatatagttttaaaatcgtggacttaccagaccgacgtactcctgttaaaactttaattatttgtttatcacgtagtttattcaatttatcaatgtatttaggccgcggaagcatttttaatcctttcaagttaatgtaattcaaattagtttaattttcacgtcaattttagcatataattcaaattagtttcaatctcttaaaacttctgagatgagttttaatttaatttgaatttactcaaaggcttaccactaaatttaaataaaaagaaagtctgtcaatctaacaaactttcttttttcataaataatcgttaactacatcaacttatatttcttcatcaattcttcgatataagtgcccttaaccttcttaagcatccctttaatcgcaaacttttcaggcattggcaaatcaagatcagccaacttcttctggtcattcaggtaatacatcgcattcatcaacattctgacatcaaatgcggaagcgaagacttctggtacaccgcggtcaatattaagcaaagtgtagacagcttccattgccgtccgaactgaatactctgtcgtaaagacagtgtctcttggagtttcggcaaagttaccaataaaggctaagttcttagaatgatctggaacaacctttgggcggtcgcctaaagctcttggcataaagtaagaagtaatatatggcatgtgaaccggaattgttgtagctgcggcagctatttcaggaattctttcttccggcacacccatgtgatagagccactcttcacacatttcaagcccattacaatcaggcatcgtcttttccacataattacccttggtatcagagaataaaccatataaccaaacaattaattcatttggtttttgcgccttaaagtgtggctgacggctgattgagtaacctaatagccaattagaatccttaatagtagttggtccactagttacgattgagccactgtgtggatcctttttattaacagcttcaataaatggcacaacatcatcattcttaaaggtaatagttgaagacatccgccagttagcctttggaatatccttgcaaaagacatcaggatggccaaagtcttcatcttgagctgctaagttcttccacaatcgccagcttgcacccaattcatgttctgctggagcgtgatgcagttgatctccataggtagtactctcagtaattgaaccattagtaacgaagactaagtcatttggtgttaagtcaatggtcttcttttcgccatcttcggttaaaataatttgtttagcaaccttttcgccgtcagagcggttaacaaagatattatcaaccaccgtattatagtggaagattacaccacgatcctttaaatacttgaccagcggcaaaatcaatgattcatattggttatacttggtaaaacgcaatgatgaaagattcttcaaggttgctacatgctgtacaaagcgcatcaagtagcggcgcatctccatcgcacttgcccatggttcaaaagcaaacattgttgaccaatataaccagaagttagattcaaagaattccttagtgaagacttcattaatcttcttattttgcaagtctttttcgggagttaaacaaagatcaacaatttccttcactgcctttggtgtcaaaagaagttgcccatcagtcggcaaagcttgaccacgatttacaattactctagttttagcataacttggatcttttctatttaaacgatagaaggaatccaaaatagattcaccttcatggtcaggcgaagggattgatctaaataaatcccacaaacattcaaagtgcggctccatttcacgaccgccacgaatgatgtaactttccttttctttattatagatcccatccattgagccaccaggcagacctaattcttcaaaaatgtgaattttcttgcccttcatttggccatcacgaattaaaaagacagcagtagctaatgcagccaagccactaccaacaatataagcagatttttgatcaacatctttaggtttatcagccttaacaaaggcttcataattgccattactataatgcataattgacacttctttcaataatcgttacacttgtaactatttatgcttataaaataatgtaagcggtatcagttgtcaaacattttacatttggggatgatcttgatgaatatgaagagtctgcatacgcagcaacaaattgaacatgcattattcaaattactacaaaaaaagccttatacggagatctctattgcagaaatcacccgtaaggctaaggtatctcgtacttccttttatcgcaattatgaccaaaaagatgaagtcattgcgcaatttttatttaatcaataccataattttatcgctgatattgatcaacataatttgagaacttttaagcagcagcttactgcctaccttgaattcttcaaagataatcctcaactaatgaaattactgcttgatgcaggatttgaaggagaattacttaattttcaaactaaatatttgaaaaagctgatgtcagtttaccattctgatgtccacctacccgactatgcaatagcctatcaatctggtggaatctatatgctgttagtctggtgggttaagcaaaattatcagaccagcttgactgatttaatcacttatgccgaaaaacacattatgctgtaactaaaaaagaagagctcacaaatcgagcttttattttcaaaattattacaatttcttgcattttttaccaaagttaaagtagaaattcattacaaaggcgataattaacaaaatcaatgaaaccaacataatttccttaataccgccgtggaaaatagttctcattgttggcactaagttttgcggcaaactcttggcactttgcgcatcactcaatttattcatcatggtcatcgtgattcccttgtgcgtttgaactccgctggcccagttcagattcataattacgccataaacagcagccattactgtttgagctaaaattctgatcaaatatgaagttgaagtggccgttgccatattctttagtcccgcatcaagttgtacctttaattgcaaagcaacaaagataaagccaaccccaatgccagaaaatgcaccaataaaggtcaacatctgcacaggcgtatgtatgccagaaataaacaaaccagctgatgagataatcatggcaactattccaatcaaaactaatttaaaggttgtcatatgctcctgaatcgctgctacactttgagatgcgataatttcaacaatcgaatttggaattaacgtcatcccaccaattaaagctgacaagcctagtaatgcctgagcccacattggcatataggtgtttactgctaaaaaggcaccccaagtaaaggcaaataataaaaagtcgccatctaaatctttatttttaaataaagaaattggaataattggattgtctgcatgaccttcgcgaataaagaaaaagacgatgaagactaaactaattataatcaatccaattatgatccagctagcggttaaaccaactagttgcacgcccatcaagaataaaagcagtccgattactaataaagtagcaccagggatatcgaaaaccggtgtcttttttggagtaaccggtttgtagtaaattaaacaaatcaaaaatgcaattaagccaattggaatattgatatagaagacccagtgccaagagaaagcatcaattaaccaaccaccaacaagtggccctaagatcgcagccccattccagctggcagttaaatagcctaatactttggttctcgttttaatatttttaaacacataaccagcaatgatataaggtaaagaacccataccacctgcaccgattcccatgataaagcgagagcacagaaagaaaataatatttggcgctatcccttgtagagccgatcccaaaacaaagagtagcaatgaaagctcaaaggctcgtttgttagtgattttctctccgatcttggtccaaatcggaatcgaaatcgacattcctaataagaaaattgccacaatccaacccatgaattgaattccgtgcaaggccgcgacgatggctggaatagcggtattaataatagttccgtctagccccgacatcacgttgccaagcatcaaggctgccgtcaccattgtaatctgttttttattcatgcttaacttctttctatggtatgtaaaaagcgttagacaaaaatttctaacgcttttgagtaaaaaaatatggaggatacagggctcgaacctgtgacctcctgcttgtaaggcagatgctctcccagctgagctaatcctccattatggggcggaatgtgggaatcgaacccacgcatgctggatccacaaaccagtgtgttaaccccttcaccaattccgccatcaacggtccatatgggatttgaacccatgatctcctccgtgacagggaggcgagataaaccactgctccaatggaccaaactagaggaggatgtgggatttgaacccacgcgcggcagaaccgcctaacggttttcaaaaccgtccccttaagccacttgggtaatcctccatagccgaacagatactagtataccaaagtgagaagataacgcaagaccttttttaaaaaaaagcaaaaaaataaagcctttcggcttcattaactatgtaaatttttctggaacagcaaatacttatattctttgccagcaatttcaataaaacgttgggtagcaatattacgccagccaaagtgcttaaagaattcttgtgcatctttatcttcagccagacaccacaagtaaatcttgccatagcccatcttcttcagttcattttctgcggcatttagcaaggtcttacctacattgtagccttgaaaatcaggtttaacatataatgccatcaactcaccgcagccaagcattctagtgtcacgtggacgaccatagctaacggctgcttgaacctcgttattatcgtctttaaaaactaaattatgacgaccactctcattgagtcgttttacccaagcagtagccggaatattatccaaaaatacatctggtagcacgcctttatacgtctcttgccaagttgtttggaaaagcttacttgtttgttttgcttcgtcttcactaattaatggtttaataatcatatttacttcttctttgtcaaaacagtcacagcctctacatgtggcgtttgtgggaacatatcaacaggatcgattcgcttaaattcataaccttgttcttggaacaaaagcaagtcgcgaatcattgttgcaggattgcacgaaatataaacgaccttcttaggtccagtcttaactgtcgcattaataaattcaggtgtcaacccttttctcggtggatcaacaaaaaccacatcggtcttcataccctttttagcccaacgcggcattatttcttcagccttgcctaagtaatactttgcgttttcaataccatttagctcggcattgtccttggcatccttgatcgcatcccggacaacttcgattccacgcacggccttcacatgcttagctacactcaaaccaatcgttccaattcccgaatatgcatcaattactacatcatccgaacctaaatctgcttgcttaatcgctaaatcatacaagcgcggtgtttgcagcgaattaatctggaagaaactttgaggtgaaattctaaactttaaatcaccaatttgatcagtaatctggtcattaccgaaaactaggtaatcctttttacccaaaatcacattggtcttcttaggattatagttcaagactaaacctgaaaccttaggaatctggctaatctcagctgcaacacccatcatttgtgggaaatccttaacccggctgaccaaaatgaccattatctcgccattagccttactacgacgcacatcaagatagcgtataattcccgtattgtttacctcgtcataaggcgcaatcttgtacttgcgcaacacatcacgcactgcaaccaatacacgatcaatttccggatcagtggtaaagaaatttgtcaaaggcactaaatcatgtgaatgtcgtctaaaaaagccaatctcaagctgtccattatattctcgcacaggaacttgggccttgttgcgataccctgtttgctcaggactaggcaaagtttgtcctacttcaatctcatctaaatgtgccttcttaagtaagttaacaacttgattacgcttgaattcaagttgcttatcatacttgatatgagctaaagaagcgagtcccgtttgaacccattgattcaacttgatcttaactcgatcaggactttctttttttatttcttcaattttagccaaagcaaagttcttcttaacctttaaaatctttgcactaaccacttcacctggaagtgcattagtaacaaatacggtcattccctcgtaatgggccacacccattgcttcatacgaaagatcggtaatttctaaatctataatttgattctttttcatactcactcaaccttaaaaaaatagctctctattattataatacttgaccaatctttgtgcttcaaaaaataatcgactgctttttagaaccaactatcacccatatacgcatgcaaaatgtggttagccgctactttcaacctcaaataattaatattattagaaaatagcataatcatacgcttggtcttgtaattcgcaacaaagcagcaattataaccagggatactgccattagcgcgaatgatgtcaccattaaaatacactccaccaaaataagctaccgtctgatgctgggcttggtggtaatactcgtttaccattttaggatttttcagcacatcgttatatacaaacttccaataatcaattggtgacatgaataagttccctgctccaaagtccgacgacgtcgtcactgtcacttggtgccagtcaacatttttactcattggctgagggatctcgttttggttaacctcagaaaaatccttaactttctggagcttaagtggcttagcaaaatcggtctgaatataagcattataacttaaattagtttgtttgctaataatagctgctagcaattcataatcaacatcttggtaatcccaagtatgaagatgatcattctccatgtgattaagcatataagctatttgctctttctgatttttaagcggagaagatggtcgagcattgttaaccaagccactagtatgattcatcagctcacgaattgtaatatctttactacctgaaacttgaggataatagttagataaagaggtattccaacctaataacttttcttgttgcagctgataaattgcagttcctgtcataattttttgtagcgaagcaatcggaaacaattgattagcgttaactatttggcttgaatcagtggtctccttattttggacaacaatcggttgcccctttttatcattaattaacattacaccgttgatatgatgaaacttcatataatcatgcagctgttctttctgattcttaatgccattatccagcttatcccctggctgcacaatgaataaaaatattgcaaaggcacaaagtgccaaaaagatggataaagctcgttttttatgcataaagattcctcttaattactatcccaagcaatgtaataactatatttcctcaattgtaaatctagtatctaaatagattcaactattgtgtgattttatgcaatgaaaaaacatgcttcattagaaacatgttttttcaagtcattttaataaaaacatgaacagcataattaccgcgagactgtaaaatagtttgtgtaaggatgaatgattccttaaatttatttctttaaacattagaaaaaggagttcctttctcgtatgattggtttgaacaaaaaaacacatacagaaagaagaactccttcatgaatgattttaccaaagattttgctcaagctctattcaatccagacaaaataaatgatttattgcgcaaagagctacaacaggctgttaataacttgttagaagctgaattgaccgcctttctgggctatgatccctatgccagaaatggctggaatactggcaactctagaaatggtgcttatttccgcaaagttgatacgcaatttggcccaattgaagtgcaagtgccccgggatcgcaacggtcaatttcatcagcacacgctgcctgactacaagcagcactcggatatcttggaaagcatgattatcaagctttactccaagggcgtgaccaccagggaaatagccgatctaattgaaaagatgtatggcagccattacagtccagctcaggtatcaaatatttccaagcagatgattccaaaggttgaggcttaccacaaacgcaagctaagcgacaagtttttctgcgtctatttggatgcgacataccttcctttgcgccgagaaacatttgagcgtgaagcagtctatattgccattggcatcaagcctaatgggcacaaggaggtcattgactactgcattgcacctagcgagaacattgaagtctggacagatatgcttcaaaacatgaaatcccgaggcttaaagcaagttgagctttttctttctgatggtgttgttggcatgaaaacagccttggccaggacttatcctaaagctcattttcaacgctgtttggttcatgtcatgcgcaatatctgcgctaaagtacgcgtcgacgatcgtgaaaagatcatgaacgaattcaaacaggtgcatcaacagacaaacaaagaagaagccacagctgtcctgcatgacttctataccaaatggggcaaggtttacagccatgttatcagaagcttgaaagacatagaaccagatctgctggtcttttataactatcccaagcagatcagagcttcaatttattcgactaacatgattgaatcatttaacaatgtgatcaagcgcaaagctaagcctaaggcagagtttccaactgaacagtcgcttgatgcttttattggcattcaggcaatgagctacaatgaccgttatttcaatcgaattcataaaggctttggtcaggttcaggacaccttagaatcctactttgattaaataaataattaaaaaatcaatttacgagaaagatctatttacacaaaagatttgacagtttcattaccgcaataaatttcactgctcttatttcatgcactatactaaaaatagcttttctataaatacgtcacattcaaaaagattttgcttaaatctattgacagatatttttaatcttgctatcatattgctcaacaagaaacgaaaagtagcaactttgctcagcgttcagagaactggtggtagctgcaaaccaggcaggcaaagcttgacgaaatacatcgttataatgttgttcggaaaaattcagaaccgttaccatctgatagagattcaagttcttatgcttgaaagagtgggtggtaccacggctattgtcgtcccgttgactaataagtcaacgggattttttatttggaggaatataaaaatgaagaaaaagaaagtttcctttactgaatcaattattatcttaattgcactcctcactattctgggattggcagttatcaagcttgccctttctccagaagtgccagttttattcattgtccttttacttaccttttgggctagactgcgtggcttttcctggcaagatgttcaagatggcatcaaagaaggaattagtgtagccattattccgatttttatctttattttaatcggcgctttgatcgggatctggattaaagcgggaattatcccttccatcatggtcctgggtttccacttaatcagtggtagtttcttcgttccatctgtttttattgtttgttcaattattgggatggcaatcggtagtggttttaccacaatctcaactgttgggattgcgctttttgggatcggaactagtatgaaccttaatcctgccttagttgctggggcaattatctctggagctgtttttggcgataagatgtctcctttatccgattcaaccaacctttcttcagcagttgccgaaagtgaattattcgcccacattaaaaatatgatgtggtcaaccattcctgcttttgtagtttcattaattttattctggatcttaggcaacagtggcaacatggatccaactaagattgaacgtacttcacatattttacaaactaacttcagtatcagctggtgggcaattgtcccaattatcttgatgatcttttgtgcttggcgcaaaatttccgcaatccctacgctctttttaaacattgcgattactgtaatcatgatttttattcaaagtccccacgaatctattcaatcgcttaacaatttagttatgaacggctttgtggctaaaactagtgatgcttctgttaatgccttattaacccgtggtggtatttccaacatgatggctacagtagctttgatcatttctaccttatctttgggtgggatgctcatgaagttcaacattgttcaaagtgcaatggaaccactcgttaaacatttaaccaagcctggtcgtttaattacggtcaccattttatctggtatctgtatcaacctttttgttggtgaacaatacctatcagttatcttacctggtcgtgcatttaagccggcttttgataaaattaagctttcaccattagcccttagccgcgtacttgaagacggcggtagcgtaattaactacttaattccctggggtgttgccggttcattcgccgcttcaactttaggtgtgccagttttacatttcttaccattcgtcttcttcagtcttctttcaccaatcttctctattttgagcggaatcaccggaatcggcttgaagtgggctaaagaaaagtagaaaataatcatatcagtaaaaaagttcctaagaccatcgtctttaggaacttttttacgcaatctactagctaacggttgtgtcatgttgcaaccaattattactcttttcttgacattaccattcgatcattcacagcagctctttttggtatcactttataacctcgtcaaattcacttcaccagccttcatttttgggattgtctttaccgtaattaggaaaaatgaccagcaggcaaaattacctttaaaatcatatttttccgaccagtgggataataacttctttcctacttttgcttggactttattttatctcattgctatgcctaatctgcagcaacacgggcattttcacaatattgccacattcatctggcaattcttcagtgataatgccacacctcatctttggtacagcgtcatgatgctgcaatttttgcttatcatgcctggaatcaaatcagtctgcaactgggtccagcattcttatcgacgactactaatcgcagttattagttccggaattatttactttgcctggttaattttttatgatcacttcattttaaatggtcccgaggctacccattggtatttattagatcgtatctttatcagctttttgatctttgggctctacggtggcttaagctggaattttcatcatgaaattcaaacttttctgtttacatattggtggctaattgtgggattttaccttttaacctattttgggaccagagatttatttttagccactttcaaattaacagacctaaccaacgacagttattacctaccttcaatggcaatttatgctttagcggttatcctcttgatttacctaatctgtattgcacaaaaagtctttaatatgaactactggctaaaatcaattcactttctagctttttatgcttatcgagcatttttagccaatgttttttgggatcgtatcttttggcaatattttaattttaaacagctagctttacaaaatatttatttagctgtcttactactttggatttgtacatggtgtgcttcatatttatctgtttatgtagttcaccacctttggcttaaaattaatggttctgtcggtccatcctaatttgcgcacgtcgatattcctgactgtcacgcgtaggttgagcaactatatctgtaattattatttcatgatcatttcgttcaaagacgattgcttggtctaattccgcatttacttttttattgatagtggtatcttgattaaattttaaatcatccagctcccgatcaataaatgttttttgcgaactcgtcagctgatgatatttttctgccgcttctggagtaaaggacaagatcgtctcccgtctgaattcacctattttatctggatattcacttctttgaccacggatgtcattgtcaatatatcttttttccatcaaaatcacttcctttatatcttcactatacaggaggcgattttctttagacatctttctgcctactttagttttttcataagaaaaactttactattattcatttgaccactaaatacggtaaaatagataagacaagtaaataaaaggagtgtatatttcatggataacttttcaaatactccaggacggcgtcaagtccaggatatttctgcagttaacagcttcttgactaagatgtacagtctcatgattttggctgttttagtttctgcagcaactgcattcttgactacgactgtgtttgcatctgcaattgctaacatgtcacaagccgtttactggatcatcgtatttgttccaattgttttatgtatgacaatcagctttaaggcagcaaagaacccaacattaggcatcgttcttctgttgattctttccgcagtctacggcttcgaatttgcctttatcgcaggagcatttacttccgcttcaatcgctggtgcctttttatcagcagctggcgtgttcgcagcaatggccgtcttcggttctgtaactaagcgcgacttgagcaactggggttcataccttggcgcagctttgatcgggttcttagttgcatggctcgttaacgccttcttcattagaagtggcgctgcagcctttatcttctcctgcatcggtgtgttaatcttcactggcttaactgcctacgacgcacacaatgctaagaagattttcatgacctacggcggtcaagtttcagatactggtttagccgttatgggggctttaagcatgtatctcgacttcatcaacatcttcatgttcttgctacaaatctttggcatgggcggagatcgcgattaattaatttccatacaaacatagcgttgattagcttttacactagtcaacgctatttgttttgcttaaattttatccaccaacataaaattcgatatgttgttgtaaattgttgaattcaactggacaataaccaccaatttcgccatcaaggttaactggcaaatcttgtccttcacttttaccaatcaattccgccttcaagctgcgggtcttggtataaatgatatttggatcatcaacgtgcttaccattcaaagccaatgccatcaacttcatcatgctaacagggtcagaaggcttgaccacgatcaattggaataatccatcactaagctgtgcatcaggcataacttgctcaaaaccaccaattgaattagtcattcctagtaggaacattgataattttccttcataaacgccatcatcataagtcaaacgcatctcattctcagtcaagtgtggcaacatttctgcccccttgattaagtatgcggcataacccaaagctgacttaacctcagatggtacgccatatgttaactcagttaaagaaccgctggcagcaatattaacaaaatattgaacctggtcaccaaaaacagctttaccgatatccattttacgagttttattctttaagattactttagcagcatctggaatattatcacgtggaatggctaatgcacgagcataatcattagtagtaccagcaggaataattgccattttaggcctgttttctaaaaaggcaatcccgttaactacttcattgattgtaccgtccccgccagctgctacgattaaatcaaaaccttccttagcagcacgagtagcttcattgcgagcactattttctttaggtgtagttctaaaagcactagcttcgtagcctgcttgttctaatacatctaaaatatcggccacattctttggcatctgttcgtgacctgatacaggattataaattaatcttgcttttctagtcataattactacctaacgttctaaaaattaacgactttgcaattcttggttaagtaacttgttaaccatcttagggttagccttaccacgagtttgcttcatgatttgaccaactaagaagccgattgcacgatccttaccattcttaaagtcttcaactgattgagggttatcatcaacaaccttcttaaccattggagctaaaacagaagtatctgacaattgaaccataccattatcttcaacatacttcttaggatcagtaccattttcaatggtttcagcgaagaccttcttagcaatcttagatgaaatagtaccatccttaattaacttgatcatttctgccaagtgttcaggcgttaacttaatatccttcaattcaacacggtgatcgttcaagtaaccattaacttgtgtgttcatccagttagctgccagagttggatctgcacctgccgcaacagcttcatcaaagaagtcagaactttccttagtttgaagcaaaacgttagcgtcatatggcttcaaaccatatttatttacatagtcatcgtaacgagcaaatggcccctttggtaattccttagcaatttcatcgatccattcttgtgaaatatgatctggtgcaatatctggttctgggaagtaacggtaatccgatgcaccttccttaacacgttccaaaacagtcttaccagttgcttcatcaaaacgacgagttgaaagttggatgtgaccaccagccaaaagaacttgttcttgacgcttttcttcatatgcaagtgaacgacgtacgtgatcaaatgagttcaagttcttcatttcaaccttagtaccaagttccttttgacctgcaggacggatagaaatgttggtatcaacacgcattgaaccttcttccatcttaacgtctgaagcaccagtaaattgaacaatcttacgtaatttttcaaggtatgcgtaagcttcttcggggtcttccatgtcaggttcagaaacaacttcaagcagtggaacaccttgacggttcaagtcaacgtatgagaaaccgttggttccgtgagtgttcttaccggcatcttcttcgatgtgcatttcgtggataccgattctcttcttcttaccgcgaacttcaacttcgatgtaaccatcacgagcaagtggttggaagaactgagtaatctggtaagccttggggttatcaggatagaagtagttcttacgatcaaaatgagtagttggcaaaatgtgagcgtgggttgctaaggcaaccataatacctaaacggtaaacattcttgttaaccattggcaaggtaccaggcatagcccagtcaataacattagtctccgtgttttgttcagcaccataggttactggtgaaggagagaaaatcttgctctttgtctttaattcgaagtggacttcaagtccgatagtcgatttaaaattcattcaattagtcctccattccagttggtgttttttcataaaacttgttagtgcgttcgataaagtcagcagtcttgaagacattaccttcatcaaaacgcttagccataacttgtaaaccgacaggcatcccatcaactaaaccagctggaacactagctgcaggaatacctgctaagttggcagaaatagttaaaatatcattgttgtacatcttaattgggtctgaaacttcttcgccaataccaaatgctggctcagtagtagttggtccaacaattacatcattttctgcaaagatcttgtcaaagtcatcacagatcaaggttctaaccttagcagcttgtctaaagaaacggtcatatgaaccagctgaaagggcaaatgaaccaagcataattctacgcttaacttcagcaccaaagccttcagaacgtgatttaacgtaaacatcaagtaagttcttagtgtccttagcacggtagccgtaacgaataccatcgtatctttgcaagtttgaagaagcttcacttgaagcaatgatgtagtagtcaggaacaacgtatttagtatgtggcaatgaaacctcattgatcactgcaccagcatccttcaaagcatcgatttgcttttgaataacttcacgcatttcgccgctaactgcttccatgtattccttaggaacagctacacggagacccttaacatcttgaccgataaacttggtaaagtcaggtacttcacgggttgaaacagttgagtcatgctcatctgcaccagcaattacgtttaatacttcagctgaatccttaacgcgcttagtcattacaccaatttgatcaagtgaagaaccaaatgcgataagaccccaacgtgatacacgaccgtaagttggcttaataccaaaaataccgttaaatgcggctggttgacgaattgaaccaccagtatctgaaccaagtgctgctacaacttgaccactagcaactgcagctgctgaaccaccagatgaaccaccaggaactttatctaaattccatgggttgtgagtagcaccataatatgagtgttcagttgatgaacccatggcaaattcatccatgttggttttacctacaaaggttgcaccagcttttttaagcttagaaataactgttgcatcatacattggcatgtagttgtacaaaatgtgactagcagcagttgtcttaatcccgttagtgatgatgttatccttaattgcgattggaatacctgctaacttactcttggagtagtcaaggttatctgcaggcttagcatcatctaaaacagtgatccaagcatttaacttcttatctgtatccttaatgtttgccacagtgtctttagctaacttatctgctgacaagtcaccgctggcaagctttttgtttaatgaatcaatattttcgtttaagtaattcattactcgtcctcatccttattaataattacaggaaccttaatgtagccgtttgccttttcaggaacgttagccatcaatgtttctctgtcttgtccttgccagtgttcaggtttatcttctctgaagacagtatcacgatcaacaacttgaactgtttcatcaacaccctcagtatcaacttcactaagttgatcagccatattgataattgatcccatttgatcagtaaatttatctaattcttcttcattaaacgcaagtcgcgaaagagtcgcaacgtgtttaatggtatcttttgtgatttccacgcaaatacctcctattcgccgccataaacatggacttgataatcactatcgccggtttcttttgcaactaaagcttgtacatcatctactgaaccaattttgatttcaattgggatattgccagacaagtactttttagctgacgacaaaaccaaacgggtaaaactttgaatttgttcatagccataaaattgcgttgttacggaaatgttttcttgtgaaagcttaccgtttgtataacgcaaagttgccgttaccccactaatattagggaagtagttttgaatagccgtcttgaaatcattgaagtgcgatgcatcatcactgttaattgctttttcactaccagttgtcggtaaaacttgcattttttccgacatggatttccatttagatattttactactattagcggccgctgtcccgtaagcgaagtaagttccaccaactaatgaatcttttccagtcttggagaataaaccaatcgtaatcggaatattctttaaagctttcttcttacgcaagcgagcaacaatttcattagctattttttcaccttgagctttttgttcagcacgtgaaatagtagtttgaaattctgcaccgttacgctttttctgataataatcaaccgaattcatggctaagcccaagctcataccacctaaattatacttggaaccagatccagtcaaataatcttgttcgataatttcttccaaataaattggattacgcgtatcggttccggtcttaccattatttactgggtttaaaccatcaggatttgatttggatttacgcattaaccaatcagttacagttgaggtatccaaatattgtccttcttggaagacgtattgattaggcgaaaattgattcttagaaatttgaatcagccctcgctctaattcacgcgtatcaacagaattatcattatcagtagctgttaatcctgcaatcggactaatattatagcgaccatttttcattaaaacggtatagccattcgttcccgtgttagtagtttgatagctttttttcttagtggttgaagtggttgtcgcattatttgctaaactagaatccttcaacttaccacaaccacttagagtaagcgcgattccagctaaagccattacttgcaaatattttttcacaataattgtcctttattcaatttgtgcaattgcttcttcttcagtcaaaagtggtacgcctaaagtctgcgctttagtatacttagaaccagcatctttgccataaatcacgtaatcggtcttatgcgaaactgaacccgtaactttggcacctaaagcttgtaattttttcgtaaactcacttctagtataatgctctaatttacctgttagcactacagtcttatccttaaatggattatcttcaatttctgcaggctcatctgcacctaagtaatccatattcaggccgctctcacgcagctcatcaattaccttctgtgcttctggttgagcaaaatatgttgtcattgattccgcgatcgtcatgcctattgtatcgatagaagctatttcttgcacgtctagagacataatctttgccagatttttaaacttttgagcaattaagcgtgctgctttggccccaacatggtcaattcccaatccagtaatcaataattcaactgagttttgctttgaattgtctaaggcagttaacaaattattgatcgatttttccttaaaatgatcgagttgtgctaaatcatctgcagttaagtgataaagatcagccacattatgcactaaatctttagcaatcaattgtttaacgatctttggccccaaaccggcaatgttcatagctggtcgagaagcaaagtgcgtaataccctcctcaacttgagctggacaagatggattgatgcagcgcaaagctacttcatcttctaggtgaactaatttttgcccacaggatggacaagtcgttggaatctgataagctacagaatctgccggtcttttagccatgacgacttcagagatttctggaataatatcgcctgctttatgcagtttaacggtatcaccaatcctgacgcccttttcattcaaataatctgggttgtgcaatgaagccctagctacagttgtaccagctagttgcaccggatccatgaccgcagttggagtaactactccggtacggccgacagtccaaacgatatcccgcactacagtttcttgttcttcaggtggaaatttataagcaatttcccagcgaggcaccttaacagtgttaccgagctcttgttcaattcctagatcatcaatttttaacacaatgccatcaataccatatgttaggctgtttcgtttagctgtgtattcatcgataaaggcaaaaacttcatctaatgtttttaacttacgaccggtttcattggtatgaaagcctaaatcatgcattttttgaattgcttggtgctgactagtaatttcttcaggcggattaacccaagtataaataaaggtactaagttgacgcttcttggtaactttaggatcaagttgacgcaaagaacccgctgcagcattacgtggattagcaaaaactactagaccttgctcttctctttctgcattcaacttggcaaaggcttccttgcccatgtaacattcaccgcgcacttcagttgttaacggttcaggcaaagtctgtggaatatcactaatatacttagcattagctgttacatcttcaccaacataaccgttaccccgcgttgaggcacgaaccaacttaccattttcatattcaagcgatagtgataagccatcgatctttaattccacgttatattcaactggatgaccaactaatttttgcatccgttgatcaaaatccttcagttcagctttggaaaagacgtcccccattgacagcattggaatcgggtgctctaccttggtaaaatcactatcaatctgtcccccaactctttgggtaatggagtcgggtgtcacaatctctggaaattctttttctaattcaagcaagcggttgtagctttggtcgtaaacattgtcttcaacctcaggcgcgtccttagagtaataggcctcagcccattcattaagctgttttctaagtgaagccgcttcttttttagcttcatcaagagtaatttctgccatttttccctcctgatccaaatcaatctttctttaattatatcttcttaattggcgcaaaggcagccaaaagccgtttgattcctttaccagggaaagcaatatccagctccatatcttcaccagtgccattaactttagttacaacaccatgtccccaagctttatgctcgacttggtcgcctacattccagcccttcttttcagcaccgacagcgcctgaagctttcttagcagtataaacttcagcgcgagctcgttcggctttgcgagcaaatggtgccgtctgtttctcaaagctagattggataaagctgctttgtaatttttcattttcttctttgtgcagatcctgttcatcaatttcgtccaagaatcttgaaggcggattattttgcattctgccatacatcatccgtgagtaagcattagttaaaaacagttcttgcttagcccgagtaattcccacgtaagctaggcgccgctcttcttctaattcattgtcatccatcattgcacgttgcaacgggaaaagcccatcttccatgccaattaagaaaaccactgggaattctagtcccttagctgcatgtaaagtcattaaagctacttgattgtcatcttcatcaagatcatcttgatcgctaagtagagatacttcagccaagaagtcgcttaatggattagactcatcttcttcgggctcataatgatcatcaaaacgcttagtaactgacaagaattcatccaagttttctaaacgcgtttctgattcaattgtattttcagctcgcaaggcatcggtataatcaaaatcagctaagattttttcggttaaaccggttactgtaccattttgagcataagcaattgcatcacgtaatttagtaccaaaatcgcttaatttcttggctgctctagtattaattgaactttcagccacatgtcccatcgcatccaaaatgttgtagtgattctcatccgcaaatgttaacaacttatccacagtagcggcaccaattccccgctttggagtattaataattcggttcatactcatcgtatcagctggattagcaactaacttcaagtaagccatcacatctttaatttctttgcggtcatagaatttatgtccaccaacgatttgataaggaatattgcttttaacgaaagcttcttcgactgttctagactgagcattagtccgataaagaattgcgaaatctttgtaagcccgttttttatctttaacttcttcttggatctttgaaatgatgtagtgagcttcatcatcaccgctttgggcttgatagtaggttaccttttgcccatcaccttgatcagtccacaagttcttagccttccggttctggttatttttgatgaccgagttagctgcggacaaaatgtgaccagtagaccggtaattttgttctagcttcacagtcttaacatcatatttcttgtaatcctgctcaaaattcatgatgttttccatattagcaccgcgccagccatagattgactgatcggcatccccaactacacaaatattcttgtattgtgcagccaaagcatgacagagttcatattgagcctggttagtatcctgatactcgtcaactaaaagataacggaacttgttttgataatagtgcaaaacttcgctatcttttttaaacaaaactagggtctgcataatcaaatcatcaaagtccataatttgatcacggcgcaatctacgttgatattcttcatacaccttagccgccatcttctcaaatggtgacaatgcactctgcataaaagcttcaggatccagcaagtcattcttgccattagaaatcgcggctaaaataccgcgtggatcatacatcttaggattgatattcaagtctttttcaatatgcttaaccaaagttaattgctcggccgaatcagcaattgaaaaattatgaccataaccaatcttatctgcatcccgacgcaagatccgcacacacaaagcgtggaaagtcgacatccaaatgtcgttagctgctggtcccagcaacttttgttcacgctcacgcatttcactagccgccttattggtgaaggtaatggctaaaatattccaaggtgcaacatgattttcttcaactaaataggcaattcgtctcgttaaaacagaagtcttacctgaacccgcaccagcaacgactaataaaggtccttcagtggtttctaccgcttctttttgttgcggattcagaccagctaagatagatttttcgctcattattttccccttcactaaaaattatttcattaatgcaacttgaatattataccaaaaaagcagcgactaattcgctgctttagatttacttatcatatttttcaagatcaaactgttcaatcaaattaatcagcttatcggcatagtccggatcagtcgcatagccgtcggtaaccaaggctttagcttgtgtcttataatctttggatgctagaacatgcttatactgatcgtggttccacgttgtcccattctggaataatctagcgtgagcccgaatagaagcctcatatgagtcatatatttggaaacgcgccttcacggtaacccacttattctttacatattccttagttgtcatcactgccgaagtgttcgggttggatcctttaacaccaaaaagattgttgtatttttgcgacaaatcactttgtccataattactttctaggcaggcttgagcaatcgtgatgcttggcaataagtcatacgacttgtccacttcgcgcgcaatcggaccaatttttttgataaagtcttttttctgttttaatagttttgctgcttcctgttctttttgcagctgtgcttgttgaatctgctctgattgaatcgcgtaacgcctataatatctaaagccgacaaaagcaaccatcagaataaatagaattacgaatacacgcacaacggttttgacactttttggtactcttgatttacgttttcttgccatagttttattccctttaattactaattaaagtataaccgatttttgagtaaaaaaaaagaagtcgctcactgcgactcctcaatcagtgcgggcgagaagactcgaacttccacgatctaaagcgatcacaagatccttagtcttgcgcgtctgccattccgccacgcccgcggcacatcaactataatagcctaaatacagttgagatgcaagaaaaaatataaattattttaaatttctgatcattttacgcaaaagtttgcgctaaacgcaggtgtcccctacatttaccacaacgatacttttgtgtattaatcctgcgcattcttgggtatctcaacccacagttttcacaaagatataggtaacgatattttttctttttacgtaagccaatatcaggtgcataacgactgcctccaacttttttcagcaagattttaaaattgcgatcacggtgtcggtaacccaagcccaataaatgcaaatgatagtgggttaattcatgcttaatgattcctactagataatcatgatattgtggtactaaaaaatgcgcgttgatttcaagatggtgatcatccaaatgataacgcccacctgttgtggtcattcgccgattaatttttacaaggtgcttaaaagggcgatcaaaatattttaacgaaattttttcaactaaattttgtaattcattctcattcatggataaaattttattccaaaaataaaaatcagcaagaatttaatctcgctgattttttgctacctaaatatcttggcatacatccccgcctgcttaggcgtactaatgtgtcgtttcaagaaagttactaagtcatgtttgaatgactttttaccatccatccaggttccagtgaataagtgaatcgatttggagtccttagaaggattacacagaactccatctgaatagacatgaatgccatcttttaacacttgctcctgattacctagctttaagccatacttatttaccagcatttcagtaacggaaatactatttactcccgccatctgattcttagtgtcatattcaaaatcacgatcttgataataatccaaaatatcctgcataaatgggtggcctttttctgcaccaaaaattgcagctgacagataatcatggttttcaaaaccaataaaggcagaagcattcaaaagactatctaacttatccacgactctaacatcagtatctaaatatatcccaccttgttcataaatagcccgtgctcgaacatagtctgacacgaaggcccatttttttgcagcataagcttgttcaatataacgattctcatgcatatcaaaattatcttcattccactcaataatttgataatcaggcaattttttcttccaggttgcaatacattcttcaattatcggggatttaggattgtgtcctacccaaacataatgaatttttttaggaatcatttttaacctcgcttcaaaaagttcttaattagcttcacaatatcatcattaaaatcaagcttgaacaagaacatcaatgtcagataaataattaacatgacaattgacttaaaagccatatcgaaaaaggcagatggaattatattaggcataaacattccaatagccaaggttagcaccgcaattaacaaatacttgggcacgtcatggaaaacataactaaattcatagccatcacgtacaacccagagccgcaaaattaaaactactgcttcagtaattaatattgcaatcatagccccacctgcgccatatggcctatctaagagataactcaagacaatttctaaaattgccccaataactactggcacagcataatccttgtctcgctggttagccaaagcaaattggttagcaaataccccgccagtcggaatcatgataattgttaaggtaaaccaaaacattaatggagtcatcggaacatatttattcccaaagaaaaatggtacaaactgtttggtatttgccataataattacggcgaacaaggtacccagcattacagtagcttccagtgattttttcatcactatcttttgtgccttttttccttcgctcgccatcttaggcataatgactagcgaaatactggtaattacacccagaatcatatttgaaattcgttgtgaattgtcataaaaagaaacctgagtcgaattagaaaaccaacccaaaattggtttatccagcgaagtataaatttgagtcgcaatctgtggaatcatcaaagtaccaattgcaattgccgtctgtttaaatttgtaaaaatgagcaatgggttttcctacatagcgccaaatatcaaaccaaaagacaaaggaacctagcattgtcgacactgacatgatcaataaatatttccacaagtcagcgggtgattttacccataataaaattagaaccacactaactaactttaccgccgtgtttttcaaaacaacacgaccaaagtcagctagtccttgaaagaaccatgaaatatcaacctgtgctgagatcaagtatggcaccatcaacaagatataaaaccaatattgaacgtgaaatacagtcgctacaaaaaccgtgactaaaatggtgataataccggcgattccttggaaataccataacccccagaaagcattggttagctcctgcggtgtaccataagtgcgcgtccgtgaaattgttcgcatccctacatacgacacagacagaatacaaaaaatcatcaagaattgcaccgtattgttcacactgctataaatcccataagtcttaggacctaagacacgcgataaatacggtacagtaatcagtggcaccaatacaataaaaatctgataaaccgcattatataagatgtttaaaaatgttttacgcattttaacctcgatattcctgcgtcatgtacttaaagacgttctcacaatatgaatcaccatgcacctggttagtcaaatgtagccagtaaagacggcgattagcaatctgctggttatcaagttgatccagattgcgaattagttcatcctctgaattaacacagattccgggagtaatctcagcatatggtcccattagtaatccgcgcgttttttcatattgctctaaaaagttagtcacaaacacaatcggtttgttcaagtgcaagtaatcaaagtagattgacgaaaagtctgtcatcaagaaatcagtatcaccgagcaattcgtacaaatcataattgtggtcaaacaagtaatcattgttcatgaaagcaatgttagaataactgctcttgaaattggcaaataaacgcatttcatagggatgcaattttacaatcagatattgatgccgcttctttaattctgtatttaatttttcaacatcaaaatcccgaaaggcaaaaaagtttctctctttgattttctccataatggatttatcttccaattcataacgaaaagttggcatatagatcccgatctgtgcctgatcgtcctcagttttaaataagtcagccaacaattgtttcttcgaaattaccggcttagccaataaatccaaacgcggaaagcccagcttgcggtatttttttgtctcaattgccatacaagcactcattagtgattcatatagatcagagctagaagcaacaatatccgcattcttgtgccacaatttttcgttacggcgattgtcgcgtcgcttagtattattagccataattcccatgcgcttgagtggaacgccatgccacaactggacattaatttgatgcttgcgcaccttaaatggttggtgcgttgtaattacatatcgcgctgctccgattttctgccaggttttccacttcaagtgtgacgatggccacggctcaactaatgtaacgttatattcaggatgattcaattgcagccacttgtaaaaagcatagccgttagatccagacctacctgaaccattcaggataaccacattattgttttccatcgtggtaaatctagccaaaaaactcatccaagccaaataaagacggaataaaaagcttttcattaaaatacttccttaaaatagtctaatacctaaagcatataaaaaaagcttgagcaaactcaagcttttttctttatttttgttaaactttattctttacccatttttctctggcagaatttaacaatttcaacaatcaaaaccatcaaaattccggcaattaaaatgactaaccactgtggtccatcaagttcagtcacatcaaagaacttagtcataaatggcaattctaccgctgccataattacagcagcaatgataattgcaccattgaaccacttgttagaaaaagtatgcggtctaaaaatcgactgatgtacatacttggaattaattgcatggaacagctgaatcaagcccaaagtcaagaaggccattgtcaatgcatccccatgttgcaacgatggatcacccacatgtggaccgacatgcaaaccaatttggtatgcacctaaaactaaaattccttccaaaattccttggtaaataattgaactggcaacaccaccgctaaagaagttagacttcttaccacgcggcttgcgcttcataattccaacttccactggttcaacacctaaagcaatagctggcaaagtatccgttaccaagttgatccacaagagctgcacaggagctaagatatcccaacctagcattgtcatcatgaaaactgttaatacttcacccacgttacaactcattaaatatagaatggccttttggatattactgaagaccttgcgtccttgctttactgcttcaacgatcgtggcaaagttatcatcagccaaaaccatatcgctggctcctttagaaacttcggtcccagtaattcccatgccgattccgatatcagcttgcttcaaacttggagcatcgtttaccccatcaccagtcattgcaacaatcttgtcattagcctgccaagccttgacaattctaaccttgtgctctggtgaaacacgagcgtaaacgctgtagtcaccaacatgctgtttgaaatattcatcatctagtttatcaagttcagccccagttaaaacgcggctatcctgacctttttcaataatacctaggcgttccgcaattgcttgagcagttgtttggtgatcaccagtaatcattactgttctaataccagcactctttgcttcagccacggccgctttagcttcaccacgttctggatcaatcattccgactaacccagcaaaaattaaatcttgttcaacattatcagttgttggatcggtgtacaattggtcgactttcttataagcaagccctaagacacgtaaagcttgttgcgccatctgcttgttttgcgctaaaatattttgcttctgcttatctgtgatcggctctacttgaccaccattttcaatcctagttactcgctgtaacaacatatctggtgcgcctttgaccgctacaaagtattgctcgccatctttattaacagtactcatcaatttccgttctgaatcaaaaggcacttcttgaatccgtttgtatttttcaagcaagtcagttacatcaatgttttgatcaaaagcaaattgaatcagggcggtctctgttgggtcacccaataagtctccgccattttcaatcttagtatcattagccaaagtcattgccaataaagctgggttattttcgctaatactttcactattatcatgtaactttttatcatagaagaccttttcaactgtcatccggttctgggtcaacgtaccagtcttatcagaacaaataatgtctgtagcacccaatgtctcaacagcaggcaatttacggacaatcgccttatgtttggccatcgtttgcgtacctagtgccaaaataatcgttacaattgctggcaagccttccggaattgcagctacagccaaggaaacggcaaccaagaacatgttaatcattaaagtagagttacgctctgctgaatcagccttgagcactcctacgataaagacaataacgcagattgccaaaatcatgatggttagggtctttcccagttgattcaagtttcgctttaacggtgtatcagtttcatcagcattgttcaacattgtagcgattttaccaacttcggtgtgcattcccgtactagttacgattccttcaccacgaccataggtcacattagtattggaataagccatatttacgcggtcagctaaagcaatgtcttcaccttctaaagtttctgcatgcttttcaactggaactgattcaccggttaacgctgattcctcaatcttcaagctgtgggcttgattcaagcgtaagtcagcaggaaccacatccccagcttctagtaaaactacatctccaggaaccaattctgtgcttggaatagtaacgattgtatcatcacggcgcacatgcgcatccggcgtagccatttccttcaaagcatcaatcgcagcttcggaacgtgcttcttgaaagacacctaaaattgcgttcaaaatgaccacaatcataataattgcggcatcagtccactcatgagctaataccccagacaaaatcgcggcaatgatcaaaacaataatcataaagtctttgaattgatcaataaaacgcatgaacatgctttgctttttcttggaagctaaggctttcggaccatattgctctaatctagctttggcatcactagcacttaacccatccttaacggacgtgttaagatctttttcaatgtcggggatcgactcgacataatattttttcgccattttccctctgctatataaaacatagaaacatgcagaagtttgatattttccacataccagaaaaaaatatatttttcctttcctaattttatttactgtcgtcatcattggtattccgatattccatctggggagtaatcgcattgaccaactcctgcagcttaagggcttagccagccccattattttttattttgttaatgccaataaatttaatactgcattgtcatcacgatcattgctatagccacactcataacaaacatattcattgtgcttggtgccatgttttctattgccctgcaaagtgattttgtctgcaccatttttgacatagccgcaactggcacatctttgcgttgacgggtagcttctatcagccaaaattagctctttatcataccaagcacatttataggataatatctgtctaaatttgccaaacaaggacctctgtatgcctttggaagccacatgcgtcatcatcatttgcttgacattcaagtcttcaatgacgatttggtcataattatttgccagctcagtagtaaatttttgcaaaagatcattctgaatattgacagccctgcgataatcacgctgaagcttggttctcacttgcacgtaattattgcttcggccagccaattttccattaacccttcttttcttggccaatattctctgataatgcttgatccgcttgtacagtttctgcagtcttgccggcaaaatattgattctgccctcagtatagctgaagtgcccaacgttgacatcgatggcggtctttttgccagttttaacctttattccagctttttcttcgtaggaaagagcagcgtaataatggcctctttctctaaagatgctggcaattttaacctgtttcatcctcaatgcttcatatgttggaatatcaaaccatgatttaattcctctgggcttatccagtctgagcttgccattaataactttagctcggtcagtcttaaaaccttgacgtggagctttctttgacttgaaatgcggcttgccccagtcgagctgggctttgtcaaaaaagctcttccaagcgttggccaagtccttgactgccaactgcagacaacgagcagacaaggtaaactgccaatcagccttgttattgactaattcatctcgcacccgacactcattaggactaggattattatccttatttaaagtccgtgcttcatacatatcttgccaggtttctaaggctagattccagcagtatctgcggtaatcgcatagacggtcaagttctctttgcatggtcttgtttggttttagctcagctacctgtgttttaatcatttatttcacctccaatgcaaacataagtttagcaaaggatgaaacaaaaacaagcgaacaaaatattaaatttttagcagcagctaatttgtttctatgttttatcttcctgatcaaattaactgcatctttttctatttattgctatcaaatcctatcttttagtcaatcattatttcctcctcaaaaataaaaaagagacttacatgcttgtagcacataagtctcacgaattaagataaatccagaagtatcttacttcggctgttggattcatcgcaagcaattgctgttactcccttatgacaagttaattataagcaaaattttagctatctacaagttttagcgaattgcttttactttttataaaagtcatcaaagacagtaactggcaaatgacgcttgtgtttactcttattccataatttttcaatttgatcagctgttttatctgatacttccttaccttcaaggtaatcatcaatctcttggtaagttacaccgagggcaacttcatctggcaaatctggcttttcttcttcaaggtctgcggttggagccttttcatataaatgcttaggacaacctaattccttaagcaaagccttgccttgacgcttgtccaaacggaacaatggcgtcaaatcagcggcaccatcaccaaacttagtgtaaaagccactaaagttttctgcagcatggtcggtaccaacaacggcacccttattagcaccagcgatggcatattgaactaccattctttgccgcgccttaatattgcctttgttaaagtcagtaatcttttgaccagttgcttctacaaccttcaccatagcatcaactggttccttaatattaacaattaaatcctgatctggcttttgaaaagcgactgcatctgcagcatcttgggcatctgcttgaacgccataaggcaaacgaacagcgataaattgataagaatcatcgccagtttcctcacgcatttcttcaattgccatttgacacaatttaccagtcaaagtggaatcttgaccaccagaaatacctaagacgtatgacttaagaaatggattagcctttaaataatctttcaaaaaatcaattgaacgtctaatttcttttttagggtcaatttctggtaaaacatgttcataagcgataatttctttttgtaattctctcatcgaccaatgcttctttctctaattttacgccgaatgtcttgaatcaaatccatcttggattcgtataagttttgtgataaatccactggatattcctgcggattcaggctacgcttatattcatcccataaaccatcaaggttgtcagcacagaattttttaatttcatcaagactaggttgatcataaactaattttccatctttaaaaatatcatgtaaaagtggaatagcagtgtaatcagttaccaccttattaatatagttatattgtgggtggaacatgaagagcgcgtcaaatttgcgtggatcttcattataccgagatacccagtcaccttcatttttcttagcagtgtttgcgctaatccgccatacttgttttttacctggggtggaaactttgatggcatttgaagaaatcttcaatgtatcccgcatggcgcctaattcatcttccatggcaaccaacttgtaaacagcaccaagggctggttgatcataagcagtgatatacttggtcccaatgccccagacatcaattttagcgccttgcatctttaagttagtaatggtgttttcatcaaggtcatttgaagcaaaaatcttggcatctggatagccagcatcgtctaactccttacgaacttgcttagaaatgtaagccatgtccccagagtcaattcgtacgcccaagaagttaatcttgtcgcccatttcattagccaccttgatagcattaggcacaccactacggacagtatcgtaagtgtcaaccaaaaaaacacaattcttatgtgtttccgcatatgccttaaatgcgtcatattcactgccaaatgcttcaactaaagcatgagcatgagtccctgaaataggaataccaaacaatttaccagcacgaacattactagttgaatcaaagccgccaatataagcagctcgagcaccccaaatggccgcatcggtttcttgcgcacgacgagagccaaactccattagaccatcatctttaacagctaacttgattctagcagctttagttgccaataaagtttggaagttaataatatttaaaatagcagtttcaactaactgacactgggcaagtggaccttcaacttgcaaaattggctcgttagcaaaaaccagctcgccttccttcattgaacgaatagtgagctttaattttagattgcgtaaataatcaataaagtcatcatcgtaaccttcattttctttcaaatattgcaggtcactttcggtaaactttaaattctttaaatagttaatgatgtgttccaaaccagcataaacagcataaccgttgccgaatggttccctgcggtaaaaactttcaaaaacggcattgcgatcagcaatccctttcttgaaataggtatacatcatattaatttcgtataaatcagtgtgtaaagccaacgaatcgtctttggctaattctggataaaacattgcttctctttctgtcattaaaaattaacaatttcgtttttcattatacagccattacagtccattggctattctcaaaactatttttacctcaaaattagatacactttttcaattgagtccagttgatttttaatagaaaaatgctcttccgcataccgcttttctgtattagccatctggcgtaactcttcatgggttttattaacggccagattaatctctttagcaattgaatcaatgtctcccgttttagcaatgaaaccatattcgggtcctggaatcattttatgaatatcacctacatctgtggacaaaatagggattaaattgtctgttgcctctaaaagcacaagtggaaaactctctgaatatgaagttaagacggctagatcaattcgcttatataatccgctcaattggtgttgagtcataaaaccgtgaaaagttacttgtggtgccatgtccaattgccgcgtcaaggccttcaatgcttcaagctgactaccatcacccgcgatatgcagacgaatatgctgatcatctaattttttcacagcttttaagagcaattcttgtcctttaaccttttccgtacgagcaacgttaataatattaaaataggtatgttcatatttagctggaatttcactatcactgtggaaaaagatgccattatagatgacatgtaccttgtttttatccacatgtgcgcgattaattagtagcttggcaaaacgctgagttactacgaaaatacaatcagcttttctcaacgcacgtaaattaagtttagtaaaaatattgccaatgattcccctaccttcaaagtctagataaggatctgaatgtacagtaatacaccaagttgcacgaattcgcttgtgaatcaaagataaaaataagttggcacgcgcaccatgagtatgcacaatatcatagtgcccctcattgataaacttagtcagtctacctaaactgcctaagtcataacgactattagctcctagcacatgtgtagtaatcccagccgctcttgctgcttgtgctactggtccttctgccagcgttaataattcaaaatctttgccttcatttttggcttcagttagcaaattaacaatatgtgataaaccgccgccattttctaaaccagcatttacatgcaaaaccttcatcttagtaaaattattttcccttcttttttgactgtttaactcgcacaacaaactgtggcaaaactaacatccgcttaaatctgctaggattagtaatcaagcgataaaaccactctaaatgcgtcttttgaaaagcttctggtgctcttttaacgatacctgaaaagacatcaaaactgccacccacacccatcatcaaagctggtgtttcgttcttacgtaagattgataatagtttttcttgcttaggaaaacctaatgctgcaaaaaccatatcgggttgtgccttctgaatgcgccgtgccactagttccaaatcttcagtaaagtagccgtcttctgcaccaactagattaatatttgagtattccttagcaattttgctttgtactgcatgaattacttgtggcttagctccaattaagtaaactcggctaccacgatcgctagcaacatccatcagccaagtaaacaaatcatatccagtcacccgctcaggtaacggctgcttaagcattttagctgcttttacaatgccaatcccgtcagcagtaatataatcgggatcattttttagaattttcataaattcaggattctcgtttgccgccatcacaatctccggattagcggtcacaataaaggtcgacaggtgattatttagtcgattaataaattcattttggaattggttaaaagttttattatcaaaatcaacacctaaaatattaactttgctcattttcacacctcatgcgttttcttatctagtttctattctaccattccgacacgcaagtacgagaaacatgttcaagttttatattttattcaaacatgataagattgttttaataaaggagaaaaaatgaaaagagttattacctatggcacctttgacctacttcactacggtcacgtgcgactgcttaaaagagctaaagaattgggcgactatttaatagtaggtttatctaccgatgaatttaatgaattcaaaaaacacaaggaagcctacaatacctaccctgaacgtaaatacattttggaagctatccgttatgtcgaccaagtcatccccgaaaaggattgggatcaaaaaatcaccgatgtacaaaaataccatatcgacacttttgtcatgggcgatgattggaaaggaaaattcgacttccttaagccttattgtgatgtggtttacctgccaagaacgccaggaatttccactactaaaattaaagaagatcttaaataaaaaaatactccaattccattcaatttgaatgagattggagtttttgtttacttagaaaaagtgaattcaaatcgttctgcaacgtaacgtgcgcgggtgtattcgaatggttgcccatctgctagttcagttacctgtcgtctagtaattaacggttcaccttttttagctttaagaagacgcgcatcttgctcgttggcaattgatgcagaaatatgttccgtcactcgtccaatggcaaaaccaccgcgcttttctaaggttttatataagtgcgttgaaacatcttctttagaaaaattctttactaagtagtatggcaccgttacgacttcataacaaattggtgtcttatcagcgtagcgaatccgctccatccgcaaaacgttctcattatcttttagcgcaagacgctctttttcagataaagatggattgccaatctgataagaaattaacttacttgaaggaacttgaccattagccttagtaatctcagtaaaggacataattcctgacattttttcttgaaccttttgactagctacataggttccgctacccaagcgccgttctaaaattccttcatcttctaatgttttaatcgcttggcgtaaagtcattctcgaaacgccaaacttaactgccaattgacgttctgctggaatacgatcccctacttgataaacgtgattctcaatatcacgcttaatctgattgtgaatcttgatatacatcggttcttccatagtcgccacccccaaagtttagtactgctattattataatctaaattggtctagcttgcattaataacactgcttcaattttacagactattttttcttagcggtccacttcactccaagaatataaacatttggacgcttgttatattccacttcaacttgttcattatcattagcaactacactggcactaaattttgcttcatctttaacagctaagttagcctgattaggattcagcacaatattgtggcccttcatattagcttcaccgctcaaagctaaaaagtactcatagttcatatttccagtgaaggtaacacgtgtagcatcacatttcgcctgatcttgaaaatctgcatgagctaaaattacggcattgttcattgtaacttttgcttcatcaactactatcattcgattgatggttgaattttgaatgattgtccgtgtctttttatcaatataaaccccacccaaaaaagtagaattcataatattgctccagcagtcatcacttaaataaaagcaggaatcgctagcagacttaacttttgaattaagcatattcatccaagtttgcccatgcagtaatacataatctacttccgaattattaagatccaactccgcattcgttttggcaaaagtattaatactgccgtgaatctttgaattatttacaattgctgttccttcgccttcaattgccaaagcacaatatttgtccgagaaataatcaatttctgaatcattcatttccaaacggaaattggcatggtcatacatggaaactgaaccgttaacaattttggttgaataaagttccaacgtgatcttaccattaaccgcgatagctgctgtatcagttcccgtgcccttaataaagcaattacgcaaagttaaatagccatcaacgcctactggtacagataggctattatgttcggtagttgtatcaatgcataaattttctaaagttacataacgactatcttctgaaacactaatatagccataaatagtcgtgtcttctggcaaagagcctgttcccttaattgtgatatctgttagtgtgatgccctgcggcaaataataatatccggggcccagcatcaacacatcatcggcacgcaaatcctttaaaacctcgtgccaactgactgaactgctagatccccctactctaattatcctagccatccattatcctttcatctcgtaaaaaccgattactattgtactaattttctttaatttatgttgtatttttgctcatcaaaaaagctaggttcgattcctagcttcttatactatttcattttaacattccagtaataagccacattaccataaggagaaagttggaaacctttcactctcttattcaataagtatgacgtaccttgttggaatagtggtgccgcaaaggcatccttttgaattaattgtttttcagcgttaactaaggcattcaatctcttctgcggatcagtggcataagttgaacgagccaagtcaatttgcttccagaaattggcgttgtgataatctggcgctaaattaaacaaaccaccaactgtcaagaaatcaattggatcttcataacttggctaccaagttccgtaaacaaagtcgtaattgtgattagttgtgttagatagccgtgacttcaaaggaattgaccgtacccgtagagttagaccaggtaaatttttcatcaaattgctttgaataaattcacccacacgcttagcatcgtcaatatctgaagtaagcaattctaaggttagcttcttcttacccaattgcttcaaaccaagttgccattcctttttagcttccttggcattataggtaaccaagtcgccagcatccttgcggtaatcgttgccagttgcctgatcggtaataaagtttgcggcaacaattccatttgacaccttgccttgatgcaaaactgtcttgactaactgttgcttattaattgcccggctaatggcccgacgaatatgaacattgcctgtactcttacgcttcaagttgaaagaaagataaccattagttggcgtaactttggtatgatagctagaattattttgatactgcttaacaaaatcagaagtcaatgtcgtgtaatcaagttcaccacttctgaacaagttaaccccagttgaaggagtttgaaccacttgtacgttaactttattcaaatcaacaattttcttgttccagtaagttggatttttcttgtaagtccacttcaaatttgaacctgtccaaccagatacggtaaatggaccattgtaaactagattcttactgctagtcccatacttagagcctaactttttaaccaatttagaattctgaggatagaattgtgcaccctctaagatttgtggcaaatatggaattggattagctaatgtaacttgcaccttatacttgccgagtgctttgattcccaatgaatttaccggtgctttaccttgagaaattgcctcaccgtttttgataatggcataagaatcggcatctaaagatgaattttttgggtcaacggttctgcgccaagccgttacataatccagggcagtaactggatcaccgttagaccacttagcattattgcgtaaggtaaaagtatagaccttctggtctttagaacgttcaacttttgtcgcaccagctaattctggctgatttttcttattaaaacggtaaagaccttccatggaattctgcaaaacttctgaactagtcgtatctccatacttgctcgaatctaaagttgaaatttcatttgtgacagaggtattcattgtcttagtcggtgcagcattactgtcattgttagagcaagctgccagcaccaatgcggcagctgctgtcatcactcctgaaaaaatccattttttacgtctcaatcttctcaccctttacttactttttgtttaatacttacattttacaagtatatctaatacggaagaaatttcaaatactttttccgtataatagctataatcaatacgtatacaaaaatggcaaaaaaaaagaaacgtcacataggacgtttcttttttcgggttgggtgttcttttagaactattgggttagctggattcgaaccagcgcatgatggtaccaaaaaccattgccttaccacttggctataacccaataccagctgaactttttacttgtcgttcaacaatggaggagggtggattcgaaccgccgaactcagagagagcggttttacagaccgccgcgtttagccacttcgctactcctccgttagctgacttaattataataacgaaaatccaaatcaaatgcaagacttttttgaaacttttttcaaaaaaaagaagaagccatgacgacctcttctcaaaatttaaaaattgatttatatctaaacagttaattttaagcctaatgccttttgtgctacttgatttaccagactccattgcttgtcataagttggtgaaaagaagaaatctgcttctgctaaatcttccagtgtcaacttatttctaatagctaagctcaaaacattggcttggccactaatgtcatatgatgaaagtacgctaccgcctaagatttggtggctgtcttcattataaacaacagcaatatagcaagtaggattatctttttcaggaatatagtctggacgaagataactctttaagactgtttcttttgcattaattcctgctcgcttggcattcttttcactgagtcctgttgttactgcatgtaaatcaaaggcttcaagcaattgtgcaccaactaagcccttaaagacacgttctggcttgtcttcaaataagtgctcaacaacatattgagcctcatgccgtgcagcaatggcagatggcatcggtactcttctgttagctggaatgctaaatgggaagattgcatccccaattgcatagacatcctttacattggttctaaagtaattgtctaccttaatgtagccattgtcataaagatcgatcgtgtttttcaaccaatcagtatttggcttaataccaactgtaataatgacacaatcagcagtaatatcacccttatcagtctgaactgcattgacctttccattgccaacaaagccagtaactttagtgttcatagccaggttaacaccatgatcagtcaattctttttcaaataagctagtataagtatcattcaaataattttctagtggtttttgcccaccgtcaattaaagtaacattcttgcctgctttagcgaaaacctcggcagctgcaattccgttaccagcaccaataactgcaacatttttaatagcttcatcttgagcagctgcattgatctctgtagcgcaatcatagcctctcatcaacataatatttttcaggtctgctccaggaagaggcaaacttgcggggttaacacctgaagaaataattagcttatcataactaacttctttggttgtaccatcttttacgtttttgacagtaaccgtctttttagctggatcaagagctgttactgctgtgttattaacaactttaccaccccgttcaactagatcttcaggagtaaagtttctaacgttgtcttggcctgtagtttttccttcaaggaatagcttcattccgcaagacataaaggaaacgaagtcgcctgcttcataaatcgtaacgtctacatcatcataacgatctaaaatttcataagctgcctcttggccgccgtgggatgcacctacaataatgattttcttttttgacatagcctgacctcctaataatgcagcaataattgtcgtttttaagtaatagcagttattgtaactggttacattatttatcttttaataagatatttcaattaatttgcttttgattagtgcgaagcagcaatatattttttatataaaaaagagcactactgatagtagtcaatgtcattaagttaagacattgacaattaatattagacttttaaagcactgatttaacatttaattggttaaattggtgcttttttcgtacaacaaataaggcatagcacagattctgcttttttaagctacgcgatataaataatatacagctgatttgggcttaatatttctcttgtccttgcggcctggtctaattggaatggtataatagctgatctgaataaggatccgttcaaaatcttgcgttaaagaagaagccaaatacatgctctgaataatcaagcatgattgcttgaaattgatggcatattgatacttgcaatgcttttgcggaatataggcctgtgcatcaatttgactgattgcattaaacataatcatatgggcataaatttccatttcaataaatttatcttgtttggaatggaactgtacactgcctaaagaatacttcaatttcttgaaggaggtctcaataccccaacgcagatgataaagctctttaattctttttagcggataattttttcgatcaagattggttagcacaacttcccattcttctttgcctgatttggcatcattaattctaaatttgcaggctcgaaattttattgtgcataactcgccaaaatcccagcttagatcctgggtatttttagagcgatacttaatatattggcgataatgatgctggacatggtgaatattctcactggctttatgcgtgatgtagtaatagttagaagtagttaccaggcaggaaatctcacgatcacattcttgatcaggcaatgtcgttatttctttaactccgccttgtccagccttagttcgtattatgtaatgacagttaggcaggcgattgcagttttcaatcatattgaaactagtgtagccacgatccattgttacaatatatggaccacaattcaaagctttaagcatttgaacagccgctttgcgttcatccatttctgatttaggctgaaaaatacaatcctggtaggtattattcaatagatcatataaggcattaacgtgaatttgacaatagggtttctttttatgagaagaagcttgtacaatgttattcgatttcggattccagatttgattaaagtcagagccatcaatggcaaacaaacggtagtgatgatcaaaaagttgaatattaaatagattttgattaaaaacagtcagaatatgtttaaaacaagcaggagaaagctggcttttgcgttgaacataggcagaagtactaactactttatcgttctttttagttgcatcttcgccaaaagctctaaagagttcactgtttaaattctgaccttgcatgttaattgtagttttaaggactgtcgctgcatctaaagtgcgtttcctggtaaaagcatgaggattattaataaaatcgtgaatatgatccccagtattattgataatttgatcaagacgttctagaatattcttatgaagggctttcataattaacaccatctttctggcaataattttgaaggtttaaaatatataatatataagataggcgaaaaggctggtcttttcgcctttattttatacaaaaaaagagatcgaatccaaatgattcgatctctaaaaaagcacccttaattgtcaatgtcttaacttaatgacattggatagtagtactctagagggaaattttccaaaattatcttatttagctaattctgctgatagatttcgttcactaatttagtgatttcattacgattaagaacttcatcatacatatccattgtttcctggattgtattttctaaattagtaccatgatttttggcatagccaataaacttttttgcatctactattttagcttctttaatcgctttttctgcagctcttttagcaacttcattcatctcatattctggcttattcatgtcttcgacccattttccgctattcacgtagtagtcgatatccttctgcaggctgatatccctgcgtagtacatcatccgtttttctagatcatttttacgtgttgtttgcatctcaatatcatacactcgactttgatcatcttgtgcccagatatctaagcgaatgtttttggattctagtccaatgttgccgtcatactgggtaatgacattaacttttgtcaattttaattcaggaaacatccgacgtagcagttccagacaattctttttattgctcataacatgaccgaataccaagtcgttagtaattcgaggatatcgattaattcttctcctcatattttacctcttttctttttcttaagtaggaaaattaccctccactatttattactcaaaaaagtgcaaatttttcagaaatttaaaaatttagacacgaaaaaagccgatgcaaatgcatcgactctttcagttaaattattctactttttaatagaagtttacagccttgatgtaacgcttgttgttgtttctgcagccttcaattctgtagtacttcttaccgttcttaaatctcatttgaccaccgtaagtagttacagtttgacctctgtacatcttaccagtacctggagtacgacggtatgatgaccaataaatgtaggcattgtgcttaaaagtacgttggttaccagtaatgttggttacacgaacgtattcgtccttgttagccaccttgtagtaagtcttaccgttgatagttacaacagttggaacgatttcaatgtcgttgtaagcgtagtacatgtgacctaagtagttaccgttcttgtcataagctcttgaatcaaccattactggcaaagtcttggtgttagtgtcaccagctggcttaacaagtgatgaagtcttaacccaaatgttgcttgagttagcatctgacttagacttagttgaaacttgtgagtatgatacattgttaagggttctagtttgatcagcaacgtaaacagtgtcaccatctttgaaagtagttgaagctggtcttacattaatgccataaatgtggtaagttgcgattgagcttgcgccattagcatatagagcttgtttgtggcttgaagtaattaaaacagtgtatgttgcagtagtcttcttaccagttaaaccagtagcagttaaagttacattatagtaacgtcctgcttctgaagtattaacaggatttgaagttgcttctagtgaagcagctgtattattattgctgttttgtacagctgaaataataactggctcaccattactatttacaaaattagttggattaaattgtgaaccaacagctacttggaatatttgaccattaacactccccttgctttgaccattcaatgaccaattgatcactggattttgagtagtatctgtagttgaacttgaacctgaaactacaactgggatttgaacagtagctgtttgcgtagaagtagaacctgtaccagttaaagtaagattgaaatcactagttggtaccgcagtaatattcttgttatctttacacctgcattcttaagaatagcagcaacttcactatctttaaggttaactttttctccactggcattattcgtactaaagaaaactaatcctaaatcattaattgccttagtaacactagctacagtatctttagccttaatagaaatagtagttggtacaacattagctgttttatcggtagtacttgcagcatcaattacttgattgccatatgtaaagtatgatctatctgttggctttgctgttgttgctgtagtagtacttgtagtaccagtagtgttagttactgtacctaaactaatagcagcgttaactggaacagctgaagctgctacaggagcaactgccaacaaagcggcagcagccatacttacaattcttgtattctttctcataattatgtggcctttcctttctgaaacagaaattcatcctaagcagtaagttatatcttcttctgcttgtgaaataattatagcatgttacgaacccgattactaaaaacaggatcgactcgtgtgtgtgattttaagaatacctcctaaaatcaccagtaataccctaccctttatttgttaaactgtagttaccggacttttacaattaagattcaaaacattacatttttgtgaagttttaaacaagttattgatttatgacagaacttatgtgtgttaagaaaaggtaattttaacacttgttcgcttaaaaaaattaaagctcttagattttttgattagaaataattgcttcatgttctttaatatgctcaactcgccctgcatcccccgcaataagtaacaaatataatgcctcaatcattgtcatacttgccacgcgtgagaaataatactgcgattgcatcaccgtctgccgcactgctgtctttaaatgcacatcagctaatagcgcaatcggtgaatcatcgcgattggtgatcgcaatcaccggcatccctttttgtttggctaccttaatttgcttaatgattcccgctgcttcacctgaattcgaaatcaccaacaagcaatcctttttactcaggttcattgtctgcgcaattgccgtttcaatcgtgccacctgaatcaattgccaacaagccaatctgattaaacttatacactgcatcagcggccaccggataagtatcgccctccgcactaacctgcacaattctgctttcagtcaaaaaatgcagcacctgatctaatttggcttcagtcacattctccaaagtcgccttaatctcggcgactttatttttttcaatcaattccaaattagcactagcatcatcacgtgacatattttgaagtgacacactttcagttgcattctgagctagttgaatttttaaatcatgaaaacctgtcaaatctaaattatgacaaaaacgcgtcaccgaagcatcactcacctcagcttcagttgctaattttgaaattgtataatttaccacctgttcgggctgttttaagatcacttgagcaatcttctgatcactggctgacattgtcgctaatttactatagattgtatcgataattttagtcattattctcaccttttctgtgccaaaattatatcatcaatgtaattaattttcacaattttatttttaaagaaaataaatttatattttgattgacgaaaatcatttaccaaggtagtatgtatttgtaaataattttcacaggagaaaataaaatgaaaattaattcgataagtgacctcgctttaagtaaaatcaagccgaaaatgactatttctcttggcggcggaagcaatgtatttaagttatctcaagcgattgcacagcataacttagacatcacattatattctccatccgaacttactcgctttaggtgcaaagaactcggattagagcttcttccatctactgcagcgactaagatcgatattgcttttgatggttgtgacagcattgataagaattttaacgttctaaaaagtttgggtggaattcatctttttgaaaaacaggcagcacaaattgccaaacagtttatcctactcttacccagtcaaaggatacaaccgattctgaatcctaaaattccactttgtcttgaagtggcaccgccttgtgttaatcaagtacagaagtatttaagcagtttacatttaactagtaagattcgacaagatagttcagtagctgcatttgcccgtacgcctttgggcaactacttaatcgatgtttttaacgaagattggcacaatatcactgaacttaatcgtcaactttgtttacaaaatggcgtagttagttcttcactatttgaaaacttaactacttcattaattactgaaaaagacggagaaattattgaacttaagagaggtaataatcatgaaaacatttaattggggaattattggtactggctggattgcacatgatatggctgatgctttgaacaaagtcaacggcgaaatttatgttgccgcaaatccaaatgaagaagcactccgtgcctttgtccaagaaaaacatgtacagcatgctttcactaatcctgatgaaatgattaaggatcctagcattgatatcatctatattgctaccccacacactttccactacgactacatcaaaaaggccctcaatgctggcaagcacgtcttttgcgaaaaggcaattaccgtcaatgcacagcaatttgatgaagtggctcaattagctaaagagaaacacctaatcttaatggaaggttttactctttatcacatgccaatctaccaaaagatgcaagatatgattaagaccggaaaatttggcgaaattaaaatgatccaaattaattttggctcactcaaggactatgatccgcagaatcgcttctttaataaggagctcgctggtggtgcattgctggatatcggcggctacgcaactgcttttgccattagtttcatggatgaatatcctgaaagtatcaataccacggtaaaattctttgaaactggtgttgacgaagaaagcggcattattttaaaaaattcgaaaggccaaatggcagtgatgtcattatcgatgcgggccaagcagcctaagcgcggactggtttcgggcaccaaaggttatttcgaaatcaatcaatatcctcgcggcactgaagctgatattacttacacccagagtgctcatgaggaaagctatgataaggttactgccggggatgctgatcaggcgcttgaatatgaagtcactgattttcaaaagtatattgaacaaggccatgacgaaggcgaattggaaaaatcgcggatgatcgctcacattttaaccagcattagaactgcctggggcatgacttatccatttgataacgaggaataattagttggatttcaaaagggatcgatacataacatcggtcccttttatttgcacttattgcttattttctgcgacatatttttctagtcgtttcaagccttctttgatctgatccatcgacgttgcgtaagacaaacgaatatatcctgctccacctttagcaaaaaatgagcccgcaattacagcaacatgcctcttttcagccaaatcataaataaacttggtatcatcttgttccaagcctgctggaattttggcaaaaatgtagaaggcacctttaggcttaacgcattcaaagcctaacttggttaatccttcataaagcacatcacgccgcttttggaattctttcttcattggttccgcatcgttcattccattgcctagtgcttcttcagctgcatcctgcattggcgttggttccgtcgttgtgattgcttggtgaatcttagccagttgatccaaaatcggcttaggcgcagctaccacaccgattctatagccagtcattgcccaagcttttgacacgccattcattaaaacaacttgatcatgtaaagtcttttccatcgaagcatgtggctgatcataattgagctcactataaatttcatcacaaagaacaaaaaccggcttatctcgaacaacatctgctaaggcatcaagttcatcttgtgaatacatcacacctgttggattggtaggataattcatgacaagcgccttaacgcgatcaccatacttgtccaatgctgcttgcaatttatccggcgttaatttgaagtcatcgtcagaagtgtcgatttgttcaaccgttgcacccatggatagggcatccccaatataaagcggaaaaattggtgttggcaccaaaacaacgtcgcctggattaagcgccgcagtcaaaaagtcgtagatcgactccgttaccccattggtgatcaaaatttcgcttgggtcgtatttttgtccatatttttcagctaaaaaatcggctgccgccttgcgcaaacctggagtcccgttagatggcgcatagtgtgaatggttattagcaatgctggcttcagccgcttttttaatatgctctggcgtgttaaagtcaggctcaccaatcgtgaatttgacgatgtccgaaatcttgttggtgtaagctgcaaaggccaaaatctgccctggcttttgttcaaccaagccttttttcatatgttttgttaagtcgaccatagtttttcctccttatatcgaactaaatcaattcaaatataggagtctttttaatctttgtcaaaggaaatattaattttgatatctaaagtgcacattaaatccaataattaacaaagcataaatactataaatagccgtaacagtcggatacattgcctgatactttatcagcaaaagaataattaaaactatcgccaaaacaatcgttaatattctaaaacgttgaaaatatgacaaaatcggtaaagccactgtcaaaactatatcagttattaagatagtaaaatccaccggatatgatttgatataaaaaaactgaaatattggcaatgcttctaacagtaagaagatataactaataatcccacatattaaaagcaactgattaagtatctttttatagtctttcattaaatcaagcaatgtcattaagttaagacattgacaaattgaatctaatctctgtagaaccgaatcattatgatttggttctttttttgcataaaataaaggcgaaaagaacctaccttttcgccctctgattaaattattaaaccttcaaaattattgccagaaagctggtgttaattatgaaagcccttcacagaaatattttagatcgtcttgatcaaattatcaatgatactggaaagcatattcatgattttatcgatgatcctcatgccttcactaggaagcggtttttagatgcagctacagtcattaaaactactattaatatgcaaggaaaagatttgaccagtgagttgtttagagcttttggccaaaaagctattaaaaataacgataaagtagtcagtacttccgcttatgtccaacgcaaaggtcagctttcacccgcatgttttaagcatattctaactgtatttaatcagaatttatttaatatccagttatttgatcataaatatcgtatatttgccattgatgggtctgattttaatcaaatctggaatcctaaatcagagaatatcgttggaaatctcaatcataaaggaaagccatattgccaaattcatgttaatgcactctatgacctgttaaataatacttatcaagactgcatctttcagcctaagtcaaagatggatgaacgtaaagccgccgttcaaatgcttaaaaagctaaattgcggaccatatatagttactatggatcgaggttataccggctttaacatgattgaaaattgtaatcgcctgcctaactgttattatgtcatacgtactaaaacgggatatggcgcatttaaggaagtagctgagttgcctaatcaagagtgtgataaggatatagcttgctgggtgactacctctaattattattatgaaacccataaggctacagaaaacgttcatttggttaaccatcattaccgtcaatatataaaatatcggtctaaaaataccaaagatggcagctgggactttggagagttatgtacaataaaatttcgtgcctgtaaatttagaattaatgatcctaaatcaggcaaagaagaatgggaagttgttctaactaatctaaatagagccgattatcccttaaaaaggatcaaagaaatctaccatttgcgctggggcattgaaacttcattcaaaaagttgaaatatgctttaggtagcgtacagtttcattccaagcaggatagatttattgaaatggagatctatgcccacatgattatgtttaacgcagtcagtcaaattgatgctcaagcatatgtaccacaaaaaaaatgcaagtatcaatatgcgatcaatttcaaacagtcatgttttgtcatccaggctatgtatataatttcttcttcaactgaaatctttaaaaagattcttattcaaattagtcattacacaattccgatcagaccaggacgaaaagacaaaagaaatctcaaacccaaatcagctgtatattatttatatcgtgtagcctaatttctaaacaagatttgggtttatttggcatgaaaaaagagcattcaaatgcgataaatcgcaaatgaatgatcttaaaagtccaagtcgataatttgtcaatgtcttaacttaatgacattgttaaatcaagaacttctcttttttcatgtaccagtgcttaaccagagtggtcaatgcaatgtacaaggtcaaaagtacaagaactacgagaacataatattctgggatcggaccgaatttcattaccttagccaagcttggaatgtaaggcattgcagtaccgatcaatcctgcaccgatcgtagcgagcattactacgcctgaagagtgctgttgtaagaagggaattgctggatcacgcaatgcttggataaccatttcctgtgtccagagtgattcgatgaaccagccactccagaagatggccataaagacagccttttgccctggagtagcagccacataacttgtgcccacagtacttggacaaatccagaagtaaagcaaggcaaacgtaatgatatcaaagattgaagatgtcggaccaaagaagaacatgaacttaggcaacttctttgtctcccacttacgtggtacttccaagtatttttcaccaactctatcaaatggaagtgacaaacaagatgtcccgtagatcaagtctagaatcaacaattgcattggcagcattggcaagaatggcaagaatgatgatgccactaagattgacaaaatattaccaaagttagatgacaaggtaatcttgatatatttcatcgtgtttgcaaagatctgacgcccaattcttacaccatgttccaaagtacgtaaactcttgtgcagcaagataatgtccgcactcttttttgcaatatcaacagccgtatcaactgagattgctacatcggccttcttcatggctggcgtatcgttgataccgtctcccatgtaagcaaccgtgtgaccattttccttcaaaatctgaataattctagcctttgactctggtgaaagctttacaaagaggctacattcttcaaccatctttttaacttcatcgtcgctcttaccagcaaaatctttttcactataaatgtacttggtgttcaagcctactcttgaagcaacactcttagttacagcagcgttatcaccagtcaaaatcttaacggtaatatcgtcttgctttaacttcttaagcacgtccttaacatcatccttaggtggatcaaggaaggccaagaagccagttaagatcaaatctttttcatcgctaacattgaattcaccggcttgagcaggattgttcttgtaagctaacaaaacaactctcaaaccatctttgttcaaatcttcaatgtgctttaaaactttttctttgtaatcatcagttaaatcgttgatgtgactgccaacttgcacacgattgcagcaagcaagcatttcttcggcagcacccttagttaccaggatacgaccatcgccgtggcgcttgaccacgacactcatgcgacggcgcttgaagtcgaatggaatttcatcaaccttagtgtagtcgtgtttaatttcattaacatctagctcatcgctagcggcatcgatgatggcttggtccatcaaatcgtgcatccccgtttggaagtacgagttcaagtaagccaagcgcaaaacctgtggattttccttcatatccaagttgtagtgccgttccaatacaaccttgttttgggtcaaagtaccggttttatcagtacaaagcacgtcggcggcaccgaagttttggatggagttcatctttttaacgatggtgccgtgcttcgacatttctagcgaacccttaaccaaattactagtaacaataactggcaacatttctggagttaaaccaacggcagtagcgatggcaaacaacaaggcgttgagccagttacctttagttaaaccgttgatgaccaaaactaaaggtgcaatgatcgcggtcattgttaacaataatttagaaatgttcttgataccaacatcgaaattagtttccttaacgtcgttgtttgaaatatccttagccaaacgaccaaagacagtttgttcaccggtggctaaaacaacgccaacacctgaacctgacacaatagttgttccttgatagattacatcaggatagtccaaatattgatccatgtctttttgatcgggcctcttagtcgcaatcttttccacaggcgttgattcaccgttcaaagaacttgatgaacagaacaagtctttagttttgagcaatctaatatctgctggcaccatgtccccagcgtggatattaataatatcgccgacaactacttgcttggtagaaatttcttcatccttttgattgcgacgaatattggtagttacagacaccatatttaagagggcttcaactgcgtcattagttttcacattctggataaaggatgttaatccagaaataatgatcatcgcaatcataatgatcacagtactcaggtccttttgatctgccggcacgaagacgtagtcggtaaacagcgacaccgtcgctagcagcaacaggaccattgtaaaaggagtgaagaatgattcaatgaagaaatgcaatttcgtgttgtgcttcttggtagcaacttcgttaagaccattcttctccaaacgctctttagcttccgccgaagacagaccgtctagcgaactatgtagcgtctttaacgcttcttcgggagtttgcctagcgatctgcttaacaaactctgtatcggctgtcttcttattaatcagcaacttgttttttgccatgttaatcacactttctgattaaacacgcaaacaaactaaaaaggagccaataccaattagtattaactccttatctaagcgatgtttcctcgtcgttcagttttgacactacgtgacgtaagcacaggctagctatctggatctcgccttatctcgacaagaactattttactcgttggcatctctggatgtttccgggcgatagcttgtgttcacgtaggagcctcacctaacagtttatttgctttttcaattttcatttttattatatgcatattatttgacaatgcaattatctttactaaatcgttagaaattgtaaaagaatttaagaatgataaaaaacacgtgtttgcaatgaacacgtgtttttttataatttaattttgatatactattctatagacatggatatgttgcaactatttgtgtttagtagttttagcataactaaccacccctcacacattttgaaattacggcggtgagagttatgcataaacggatagtttggaggtttagtgctccgtggtagcttgggctattgcaatcagcatcgttctaggtgctttaggcaatttagctatcaatttggctatagcctatgcgataacaaaaaaagctaatcgcaaggattagctaaaccaacagttatctgaaactacgatcgaagtcaacggattgcggccgtgggcttcttttcatatacagattataacatgaattatccgaaacgaataaaaaagatcaggctcactgcctgaccttgctattgggttagctggattcgaaccagcgcatgatggtaccaaaaaccattgccttaccacttggctataacccaatcttcaaaccttttacttgattggttctatttgaatgacctctcgatcacccaacagatattagtataggggaatgaagaaaaaatatcaaggaaaaattcaaaaaaattttgattttttcacatttgctcgaaggatactgaatctttcttttatgaattataaaattaatttgtttttttacgattataacttttgtgacttcttaaccttattcattaattcaaagtcgttggtaaaaattccagctacaccaagtttaaagtacctttttgctatgcttactttatctactgtccaaattctttgcgtaactttgctaggtaaataccaatgcggatggatcgctgcaaaatgattcttagccgcaaactgttcaggaaacggcaccggccatttgtttaaaaagcaatattgttggtggggatcaattcgctggcaattttttaaggtttgataattgaaggaagagaaaataatgggatgcacaaaatgatattcttgtgctaacgccaaaacgatggcttcaatcccctcatcatgaatcttgttagtcttaaattccaagttaacatacaaatcctgtccctgaagaatttcaaataattcacttaacatcggtaccggttcaccgttagctaaacgaaatcgcctgatttcacttaaggtatagtccttaatataacctgtcccattagtagttctatctaacgtttcatcatgcattactaccggcactttatctttagttaagtgcacatcaaattcgacaccttcagcgccatgcgttgctgcatatttaaatccttgcaaagaattttccgcaaatttgaccggtaagccccggtgagcaaaaataattgtctgagtcattttttcacctacaaaaaaatgccgctctcgcggcatctgctctattttaatctaagacgattgcaccttgagttgccaaagtatcacgaactagattcttaacatctcttctaactaccataccatcggtgttctcaacgtattcaagatattgagctgacttaatatgtgcatcataagccttgtcatcaaagtaaacttcgacaaaataccattcgttttcgttcttcttattgactccagacatcataatttccatgcctggttcagcagccatgctagtcgtcatttctttcttaacttcatgcgcaaacttttctgcatcttctggtttaacttcaactttaactaagcgcattacaaaatgatctgcgttatcattcaaagcatcatgagcctttgtggtaataacttcgggctttaattcgattacttctttgtctgtggaaatcttgtcgatggtttctgcaaaatcatcagcatgtgctgctgcaatgtgcaaatcttctgccaagctattccggaacaattcgatttcgtaattgtcttcaccatgagcatcgtcatgtgcgcttccaattaacaaagttccttcttcagctggaattgagttgtgcatgttattttcaacttcacggatatattcaccgcgatcgttttccttgatatttaatttagtaattctaaaaattggtgtttcatccatttttcttgcctcgtactataatctttccacacctatcattataaactaatgcagaaaaataaaagcccctattcaccagttatttgatcaattttaaccgctttagctggccattcagtccgtacatattccaatgtactgccttcattgctagttaactgcacaaaagaacaattgggcagacctaaaaattcacgatggttagttttttcattaatgtattgcgacaaactatcgccatgaccaacaactaaaatattatcgccatcttgtgcatcccgcatgatcaagttaatcccgcgctccattcgctcaactacctcatgattatcttccacgcgaaatttgcccaaacgatgcagcggccaaagtagcacattgcgtgcctcaaaagcgccatagcttttctcttttaattcctttaatcgaacatactccatctcaggcccagcaataatctctaaagtatcacttgccctttcttggggtgagcaatatgctctagcaaaattaattccctgatcttgaaaataatcccgcacggcttccgcctgcttaatgcctaatggtgttagcgctgaatcacagcttccctgcatgcggtgtcctttattaaaccaagtttgaccatgtctgactaaatataaattaattgccatttcgtcttactttaaaccctctgctggccacacgtatgaatcaaaatggatctttttaccatcaactgttagcttcacgattgaagcattgccaaaaccgccaaagttcttattctcggtagcatcgcgcacaaacttagctaaaatatcaccatgtcctacaactaaagcagtttgaccatcctctaagccgcttaaaatctcgactaccgcacggtgcattctagcaacaacgtcttcgtctttttccatagttgggtctacgttaggattattataattccaaggcaataagaactcatcacgaccttcaaaaatgccataacatttttctcgcaggtcttttaaacgcgtataaggcatttgatgatcagtaataatttccaaagtatcgcaagcacgctcttgggttgatgaaaaagctttgtcaaaatgaataccctgctttttaaaataatcacgggccatttcaacctggcggatgcctctttcattcaatggtgaatcacaacgtccctgaactttatggtaatagttaaaataagtttgtccatggcggactaaatataaagtttttgtcatattttcctcgctaaatcgttttttcctttatcttatcaaaaaagcacgcgtcgtgcgtgctttcatattttttcgttaaattttgaagttcttgttgtattcactcgaatttacaacaaaacttggcacactaatgaagtgcattgagtaaatattgccagtcttggaaatgctaaagccataataattgtagtccccatcatgacgtgagccctgtgtattaaataaatcaccggcatgttcccattcgcggtaaaggctcttatcattacgctgattttccccagctcctgcaaagccaaagatcatttgcttcaagccaaagtaaatatttcgcttcatttcagccatagacataatcttcttattagtagaaaaaccagccatatcttcgacataattatcgtttaattctaagccatgtttcttgcaagcccgtacaattccggcaacatagtgatcgccatctttgatactcttgccattttgctcgtattcttgcgcaattgaattagctaaggactctactccagaactataaacccacggcttcaaacctaattgactacgagcactattaattaggcacaaagagaattctgccagttctttttgctcactagcagaaagatcggcaagattgatcattttttgatcggctttgctttcacctgagctaacacgtgaaaagtcgttttgctccattcctttcatgcaagcctgaataaaactagcacttggcttccccttatatgcttgcaataaactagctttcgtatagccactcggcatcttcattgtagctgttacataattctgcgttgcagcagtctttttaacgagtttggcatttttagctaataaccattgagagttatttccaatcttataagccaaatattttttcttgcccagctttaaatactttttagcagaataagcaatgtcattaagttaagacattgacaaattgaatctaatctctgtagaaccgaatcattatgatttggttctttttttgcataaaataaaggcgaaaagaacctaccttttcgccctctgattaaattattaaaccttcaaaattattgccagaaagctggtgttaattatgaaagcccttcacagaaatattttagatcgtcttgatcaaattatcaatgatactggaaagcatattcatgattttatcgatgatcctcatgccttcactaggaagcggtttttagatgcagctacagtcattaaaactactattaatatgcaaggaaaagatttgaccagtgagttgtttagagcttttggccaaaaagctattaaaaataacgataaagtagtcagtacttccgcttatgtccaacgcaaaggtcagctttcacccgcatgttttaagcatattctaactgtatttaatcagaatttatttaatatccagttatttgatcataaatatcgtatatttgccattgatgggtctgattttaatcaaatctggaatcctaaatcagagaatatcgttggaaatctcaatcataaaggaaagccatattgccaaattcatgttaatgcactctatgacctgttaaataatacttatcaagactgcatctttcagcctaagtcaaagatggatgaacgtaaagccgccgttcaaatgcttaaaaagctaaattgcggaccatatatagttactatggatcgaggttataccggctttaacatgattgaaaattgtaatcgcctgcctaactgttattatgtcatacgtactaaaacgggatatggcgcatttaaggaagtagctgagttgcctaatcaagagtgtgataaggatatagcttgctgggtgactacctctaattattattatgaaacccataaggctacagaaaacgttcatttggttaaccatcattaccgtcaatatataaaatatcggtctaaaaataccaaagatggcagctgggactttggagagttatgtacaataaaatttcgtgcctgtaaatttagaattaatgatcctaaatcaggcaaagaagaatgggaagttgttctaactaatctaaatagagccgattatcccttaaaaaggatcaaagaaatctaccatttgcgctggggcattgaaacttcattcaaaaagttgaaatatgctttaggtagcgtacagtttcattccaagcaggatagatttattgaaatggagatctatgcccacatgattatgtttaacgcagtcagtcaaattgatgctcaagcatatgtaccacaaaaaaaatgcaagtatcaatatgcgatcaatttcaaacagtcatgttttgtcatccaggctatgtatataatttcttcttcaactgaaatctttaaaaagattcttattcaaattagtcattacacaattccgatcagaccaggacgaaaagacaaaagaaatctcaaacccaaatcagctgtatattatttatatcgtgtagcctaatttctaaacaagatttgggtttatttggcatgaaaaaagagcattcaaatgcgataaatcgcaaatgaatgatcttaaaagtccaagtcgataatttgtcaatgtcttaacttaatgacattggcagaataagaatactctcttttagctacagcataatacttagacttcttgcccttatttgtataaagtctaactttcttagttcctttaacctgaacttttcccttaactgctgcttgaaccgtttgtggtgtcgtttcgtgtattacactagccgtccccatcaggcaaacactagtcaacaaagtcacaattaatttttgcttcatagctgttccactttctgtatgttttgattattaatatttgttatttaaattatatcgtatttatttaattaaaaaaatcaaaaagagacacactatcattttgacagcatgcctcctttaagttagtttgattttatttagttttgaaaagaggtttatttttagtaccagccgtttgcttgccagaatgccttagcagcagtccatgagccataacgacctttgacatagttatcagctactcgctcttggttagctgctgaatagtcaccattcaagtatgaagctgaaagttggtatttaccaacgtattgaccatttgaagcaccgtatgagccaccagattctctaccggcaatccattccttagcactagcttctgaaccacttacagttgaagtagtagtttgagtgttggtgttatttgctgcagtagtagttgctgcagaattagtattttcagtttgagtttggtgttgtactggagcttgggttacagcagcttgagtgtggtagccgcgagttacatacttagcacgaacccattggttcttgcctaagtcataccacttgtgacctttggcatcgtaagcagtcttaattactttccatgaggtgttgcttgccaaagtttggccagtagcctctggattcttgtagctgttgtaaacagtgattgcgttgtctgaaacgttcttaactgttacaacagctgtatcgttttctacaatagcagcttgagcagtattagtgttgttattagctgctactaaacctgtaactgataaagcagttactgcaattgacttaactaagatagatttaattttcaaaaaaattctctccttaaaattttaaaagtcataagtaacgaattttcaccttattcgtccgtcccattcaattgacacagcatatactaccttgcttaaattgcagaactataacaggaatatcacctgcagattaagaaactattgcaaagtatgtcaaaattgtaacaattgtaatatttatgtaaatttattcagatgatacaaaaccgcatcagatcgccatttaactcgatttttaatttttatttgctatgtgcaaaagcttgttcgcatttaatatattgaaacacttttgcaaaacgaaaaaagaaagagtttcctctttcttttttaattctcacaaattttttattaatttattccattattctgccttatcctcttctataagttgacgtttattaagtgccgcaataaatggcaggtaaatcaaaatgtctaagataatattgattacttgcaaaattgagcccgcaatactgcctgttgccaaaaaaactgaaataattggcggcattgtccaaggaattacagtcccattacataatagaactaagcctaggttcattgcacaataagtggtaatcgcatttaacattggcgcaatcataaatggaataattaacaacaagttcattacaactggcagaccaaacatagttggttcattaatattgaacaagccaggtacgatggtcagtggtgctaaaactttattttgtttacttgcgcgcttgcgccatactaaatatccaatgcaaagcactaacccaatagtggcacctccatcacccatgtaaacaaagttatcgataaatggttgcgtaacgatatgaccaccatgagctaaatctaagttacctgcttgattcaatacacggttagcatcggtttgcatcaaccagattggttgcatagcagtattaactacgttaccaacatgaataccaacgaactagaacaagctcaataaaataattgaaactaatgtaccaattaaggtatcgcctaatgcacctagtggcttagccaaaatattcatgattacatcgtgaatattgccccatccaatccaagcaaaaagccagtaaacacagccagcaatagcaattacagcggcacctggaattaaagctgaaaagctcttagctacagcaggtggcacagtagctggcattttaatttggatattatgattaataaaccattggaaaatccatgcacttaggagaccaaagataatagctacaaataatcctctactacctaagtaagtgtaagggaagccttcaactggaactttatctccactcataatacttggcgtcaaaatgaagaatacagctgcagaaacaattccggcagaaacaccatctgtcttatattgattagcataactccaagcaattccaaaagctgcaattaagaccatgatcccaaaggagccattagtaatcttggctaaaatctgtgccaggcttataccatgaacagcagtttttgatagccaatcagaccaaccggcaactggaaatgaattaatgatcctacaataattaacggtatagccatggcgataccgtcacgaacagcaattaaaggtttaaaactgcctattttagcggctacaggcataatgtgtttgttaacaaacgcattcaaacctccgctcgatttactattagccataataattccctcttcaatctaaaaatgatctcgtgtttctttggtatatacctttcgcaatataacaatatcctgaaagcgattttattaccactattttaaaagataattttttgcttatatttttaaccaaagtttgattaacaaaatattgcagttatggctgtaagtgctatagtttacatgtaatcataaaaaaagcgaggaaataaaattatggctaaatacgaagtaaagttaagcgaagaagatttacaaatgatcaaagattgtcattcaaagaacccttcaatcatgaaggctatgaacgaagccaagaaagtcgaagattaagcaaattttgatctctaaatcgaaaaaaggcgtccgcaagggatgccttttttattggttttcaaatcttgtaccgtggggatgcttccagttataaacacggactattttacccatgccatctagcactacaacatttccatcattatgtagataaatcaatggatcagaatgtgaaccaccgtcagtaaaaattcttgctggctcacctgggtattgcactgttctaactatacaatcatcaattgatagccgcctcatttgtcgaccatcatcatattttccttctaaagcagctgttggcgtatgaccagtcacaattgttttgcccgttttgttatgagccatcattttcaataaggaatcggaataccaatacttatctcgtgcccaaatacggtaaaaatcatagtcaaatttcaagccatactctatctcagagtaagtttccggatcattatactgttcatctggccgcacacccgcatgaacaaaaatcaagtgtggcgtttcatacataataggacagccttttagaaagcgataatactcactatcacgcaactcatcaggcaaaactgtactgccaaacagactaactaggctcttgccaccaccgttataaacccaaatgccatcttgatgttcctgcttctccgcaaaattgagtaacatttgctcatgattacccagtagtacgattgctccttcgcttttttgctcaattaaataatccaatacttccttcacatgctcgcggccatcaacatagtcaccgcccgcaactaattgtgcttctggaaaatctgctgttgcctgcttgattaagtctaaggtttctaagttgccatgaatatcagaaatgaagatatagttctccttcactcgatcatccaacagcgttcgattgataatttttttcatttcatactaccccatgtgctaaattaaactaacatttttttcttaattatagcagatgtacactggttctttttctatgcaatcctaaaattaacctccggcaaaaaaaaggctacaatagatatgaaaagaagtgattgcaatgtttaatgaagaaaatgcaattgatgccaaggacttacacgttgattctttcaaatatcaatcaactgaagacatgccatctgatgcttattctagctgggaagaaaaacacccaaacgccagggtattcaagcttgaatttcgcaacatcggcgaaagcaatgaatggcaggaaatgatcattatctacactgaataaataaaaagtggaagaactccaagcctagtgtgtttcttccacctttttacttattttgattttctttttccttcaatttgtgcagaatccgttcattttctttagtacgtttttcaactgctgcatcgatgatcgaatcaaaccaatgattatcagaatcatcgcttgtttgatccttcttttgaggaccttcattttttacacgtttgtcagtttcttcattaataatggaatccagccaatcaaaattatctggatcatggctcttatcagtcatttatttttcctccatttttgatttaaattaatttatttactattctttttgactataattgagttaacaagatgaaacaagaaagaagtgttcgaaatgaaaattacattcactgacaaggcgcttgactacttaaaaagacgcgaaatcttgaataaaattctaattttaatcgccgacgatggtggtggtaaatattctatcaaaggcggcggttgtgcaattggcagtcacttttccattatttatgtagacaaagttgatcctgattatccaatcaagcttgaaaacgaccaaggaatcaatatttacacttctaaatacgacaccacaatgatgggaccaaatttagtggttgactacgccaatgcatccctcaacttaaagagtgacgaaggattgcttgatggcggcgttgatatcggcaatggcgccgagttaattaaagctcaaaagaatgtaaaaatgaccggcgttgaatggcgttgctagattaagatgatcagaaaagacagtagtttgaaatcaactactgtcttttttctatagaaattgaccactattaggatcgaatccagtacgatctgccgcggtaatctttctaattaccttacatggattccccgctgcaattacattatctgggatgtcattcacaactacactgcctgcaccaataattgaattacgtccaataattgtatctggagttacgctaacccctgcacctagccagacattgtcaccaatgccgatcgaatgtgcaacacaaccaccggcttttcgctcggctggatcaaataaatggttgctggtatacaagccaaccttaggaccaaacaaaacattgtttccaatataaacaggcgcgccatctaaaatcgtgcaatcatagttggcataaaagttatccccaacatgaatattttgtccaaattcacaacgaaaattagggttcacgaagggatgctcacctgttgaaccaaagagttctttgattaatatttcttttttagcgtgatcattctcattattaatattattggtcttcaaggtagcaaggtctctcaaggtgccaaggcgaggatccgcatcattataaggacgaccagtagccatgtaattaaattttgttctaagcgacatgattctttcctttcattagttcttctatttttattatagaaaagaaaaagcgctttcgcatgtttgacgcataatatttagcacactagccctaatcttattgcttattctataatggtaaaaaagaaaggattaaagccatgaaaaacttcaacaaatttaccgctaaatttgctcgccttttacagaatctactagtagtcgcaattggtttactcgggattattctgatcatactcttattccgcgatctaattccactttgccaatcattattttcaactaagatcgaagaaagcaactccgagattatgtcagaaattatcgttttcttactcttctttgaatttactgcaatgattatttcagccttgcgtcatcacggtcacactagcatcaattttctattgggcttaggtgttactgcgctaattcgcagtctgattacttctcatagtaacatttggagtacgcttgccacttctgcttcaattttagtactagtaatcgcaatggttattttcaataaaaatctgcgtaatatgtaaaaaaactgtatcactctaggctaatgtcattggagtgatacagttttttgttttactaattaactttgcgccatgaactcattaagttgtttcttagaaaaaacattgccatatttgcatactacgtttcctttcattattgaacgtaattcacacaaccaaaaaagcatcatttattaacaatattgaaaataaataatgctttttagtaatactctgatgctgaatgccagagtcgaactggcgaccttctctttacgagggagatgctctaccaactgagctaattcagcaaactcacaacacatgaattataccaaatgtcgctaattggcgcaacgacctttttctaagctagcattcaaaaaagaacattatttccaatctaagcacaatccttgcttgtgcaattcttctggcaattgatcacgatcagtttcatgcagatcaagttttttacctgtaatctgcttagtgaatgaatcaatgcgacggttagaatcacgtaagtcataatatgtcgtaactatatcatcatagtctttaaggtctttcacatcaaagtctttcttataactaccttcaaaacaagtgaacttaagtggtaatcgtggttttaattgtggcttttgatctggcataccgacttgcatccccaacactggaaaagtcaactcaggcaaatcaagcgtcttaagcaaatccaacggatgatcgttaaccgtaccaagtggcacatagcctaagcccatactttctaccgcattagcgacattttgaaaagcaagcagcgtatcttctattgcttggaaaaagatatcagttgtgtgaacacggccgtcgtctttgtcaagttgctttctaatttgttggttacggtacaagtcaacgataaaaataaacaaatcgccttctgcaccaacatatttttggttacataacttttgaattttcttcttttcttcaggatcggtaacgtgcagtaagctagcattttgcataaacatgctggttggagtttgaccaaagacagaatacaaagtttccagttgttctttagtcaaagtttgatccttaaattttctaatagaacggtgatttaattgcgtgtcgattgtttcgttatgtatcattttcatccttcttactaataatcagtaagttcattataacaaataatatggctacttttcttcaaattcaattccgtaatctgcttgctctccgtgctcagctaaatcaagccccattaattcatcttcttttgatactctaattggaataatccttttaagtaataaaacgattatcgtcgtcatgatccctacaaatatgatagtaaataaagttcctaaaatctgagctgtaatcaaatgcaacccgccaccataaagcaagccattttcaatttgcgggttaacaatcttagtcgcaaataatcctgtcaaaatcgaacctacaattcctgaaacgccgtgacagccaaatacatcaagtggatcatctagcttcaattttggcttaatcacatgaatgaagccgtaactggctagtgtacaaataaaaccaatggcaaaggctcctgccacagtaacatagccagctgctggcgtaataccgactaatccacacaaggcacccgtacagaggccaatcatagtagtcttttctttaataaacatatccaaaaacatccaaaccacaaatgacgtaccagttgcaacagttgtagttaaaaacgcttgtgtagctacatcgcttacagttaaggcagaaccaacgttgaagccataccaaccgatccataatatactggttcccattaaaacccatggtaagttataatgcttaacctcaccatttggatcaaaatcaattcttggaccaacaaaaattgataaaaacaaggcggtaataccggcggtaatatgaactacagtcccacctgcaaaatcaagcatccccgttttggctagaattccatctggtgtccaaaccatatgaaccattgggtaataaatcaagatcgaccaaattgcgacaaatgcaagtaaaaatttaaatttcattcttccgaccaccgcaccaacaaacaacgccggcgtaataatcgagaacatcatctgaaacattaaataggtcaaaattgtgatgcctgaatccttggaataaagcgtctttaaatcaaagccgtttaaaaagacacttttactcaaaccaaatattccaccaacatccttacccaaagccaagttataaccaaaagcaataaacaaaacgattgcgacacctgtaatcatgaatactgaaatcatcgtattcacagcattcttctttgaaaccatgccaccatagaaaaaagcaagtccaggtgtcataaagaaaactaaaacactagcgacaaaaacaaatagagtgttcgtttgattaatcatctttttttctcctcaaagtaaaatagttagtcctaatattttaaattggtatatacactatttcattgatgttgcagcatatatgcttaattaaaaaatattggtttgataaaatttaattctcattatacactcatttttcttcttgtcattaattttctataaaaaataaaggtgcatagacgtatggcttctatgcacctttgcatatatttgcttttaattatttgttttcgttttcaagattgttgattgcagtttcaaccaatgcatatgcttgttgagcttggttcttagcttgaacatattcgttcaagttgtcatcaccattagtaagcacacgtgcaaatgaaatttgttcagccatcaagaagttgaacaatgaatcccacttcttgtcttcaaacttgatttccttagcagaaattctaggcatcatttcacgtgtggtattaaatgccttttccaaaatttgttcatctgcatcggttaattcacgcacattgtatgcttggtggatttggtgaacctttaaaagttcttttaataaagttcttgcttgtgcatcttttgaaactgattggttaatttttaaagccatttttacctactcttttcttttttattaacaattataccaaattgtcttcgaccatttgcttaacgcagcgtttcatttctttaatatcaagaatactgtaggcaaattcttttctaagtagttcctttggcaaatattgatcgtacttgtcgattcctggcacttcgtttggataaaccagatcaagcggatcaaagtctttatcagcttcttcgcctaaaatgcgccagaagtcatgctcatcagcatccatggcaaaatacatgaagtatggtctagatgaattaaagccacggatatttaactttttaccgcacttaattcgaattaatcgctctagtgccaaaaatgcataagtcccagtccatggaaaaagacaccacatattaccgcccagcttgatcaaattattctttggcagaccagctaaagcggcggtgtctctagcttgcgtcaagcgagctttaccattttgcatcaaatatggatacatcatcttttctgcaagtacctttttcattctctgtaaaattttaggttgaatatctccaggtacatctccaaagtaggcaggaattctaccctttacttcatggcaatatacttgatgacgcttgatatccacgtcttcgacaacccatacacgtccagcaatcgcaatcttgtctcctacaggaggtggcttaacgatcgtacctaattcttcgctgccagcgtgaacactgaattcctcgttttcttggaaaactgcgtaaaatttaaagttattcacaactcgttcaccagcaagaccaacgatcagaccaccatcttcagtccactcaatgtgacctgttttaagcaagtgtttgagcaaaacgcgataatcgtcttggctcacgttgtggaaatatgacaaagttaacacccgtgaagcaagttcagctggcgtcatttcaccgcttgaagccagcgtactcatcgtctgatgatagagcaaactatatggcaaacggttaggttcaggtggctccacccatttttcttccgcatacagttgtaccaaggcaatcccttgaagtagcggccacggaatcagttctggcaacatcgctcttgattcagggtgttcttcgcgcatgacaaagtgcatctctgatggattaccgcggcgccctgtccggcccattctttgtaaaaagccagacacagtaaatggcgcgtcaatctgaaaagcagattctagtttgccaatatcaattccaagttccagcgtagctgttgcacaagtcgtcatgtagacatcgtcatctttcattgcggcttctgcagtttcacgcaaggcttgagacaaattaccatggtgaataatgaagcggtctggctcatgattataggcacaatatgctctgagctcctgacaaacagcttcacattcttcacgactattggtaaaaacaagacactttttaccacgagtatgctcaaaaatatagccaattcctgggtcagctaattctggtgccttatcagttttcggttcgatttggctcggatcaaagtccctggaacttgcttgtggatttgttttataaaaatgttccatagataaatgccaaatctgtggttcattttgtacccttggtgtaacagtttttctgtttgaaccagcacccaaaaacttgctggcatcttctaaattaccaatagtagccgaaaggcctattctccgtggatttacattagctagttttgataaacgctcaattaaacaaaatgtttgtccaccacgatcacttctaagaaatgaatgaagttcatcaaccacaatatattttagaccaccaaaaagatgcggaatatccatgtgcttattgatcataaagctttcaagcgattccggcgtaatctgcaaaatacctgaaggatgcttgagtaacttgcgcttttgtgtttgagctacatccccatgccagcgccaaactggaatatccacatctgtgcataagtctatcagacgatcgtattggtcgttgatcaaagccttaagtggcgcaatatacagaacttttactgaatcttctggctcattataaatttccgacaagatcgggaaaaaggctgcttcagttttgcctgacgcagtcgaagccgacaatagcacattatgatcggtgttaaaaatttcttcggccgccgcaacctgaattggtcttaaacttttccagccatgttcatagatataatcttgaataaatggcgcataatgtgaaaaaacgtccatagtccatttccttaaatcttaaattcggtataatccttttccgcattatccgaaacagcctctgacttggtatagctgaattgatccgagttaagcagatcagtgatctttctatcaggattctgccaaacaatgtcgagcagctcaataaagtcacgaataatttcacgtggcgtgatattggtatccgctccaacacgggcatattcaatcttaataaattgagccaaatcatcatcagtaatcgtgcgctcataaccgtacaaattggcatgcatgtcagctagtttttcagtcaaaaccaacatttcttcagcggttaatggttcaagcttaattactggcgcatacatatcacgtgctccttcttgagcgaatttgcctgaagcaagtcggctgcgtaaagcttcgtatgaataaactccgcgacgacggtctttaactgcttgtggcgtaccacacataataatgcctaagtaccttgctttgccctgcaaggtatcgttgtacatggtcaaaatcttttcatagttgtactggcggctaattgcattcggaattttatagatattaaccaattcatcaatcataatcattaaaccagcatagcccgcttgtctaaagaaagtcgcaaataactttaaatattcataccaatcactatcactaataatgatatcaacgcctaattcctttttagcctcagtcttatggctatattctcctctgaaccacttgactactttagccttagtctcatcatcaccactcatataagcgtgatagtacatgttcagcaatttagcaaaatcaaatccatgaactaattcgtttaatgaagaaatgacgccatagattttctggtcaactgcttgctcaaatttaggatcatcattatttaagcctgtttcttgcgaaacttgcatctgcactgaattaatccagcgatctagaatcaaagtcaaggcaccgccttcaggcctagtcttagttgataagttctgaattaattcacggtatgttgctaaaccctgtccttttgatccttgcagccgacgttcaggtgataaatcaccatctacaacaacaaaatttttatccatcacatagttacggatcgtttgaagtaaaaagctttttcctgagccataacgacccacgataaaacgaaagcttgctccgccttcttgaataacatccacatcgtgtaatagggcctcaatctcggcctttctccccacggtaatataaggtaaccctattcttggcactaccccaccctttaatgaattaaggacagtttgcgcaattctttttggtactcttcttttttgtggcatgatttcatcccttcaaaaacatatcttttaagtcatctacataatcggtaattacttgtggttggtcctgttcgttattttctaaaaccacatcaccgaattcatcaaataatttttcattaatattatccatcaaaattgatgccattaaatggtgctgcttcaaataggtctgccaaggctgctgcatcagcaatgcagttaagaaaaacatttcattttcatctaagccatattcattatcaactttgacagtttcatctgcttgtttttctacttcttcttgcgcttctgcctgctctagctgcttttcctcatccgttaacaaactatcacgcgtcttcgaagcattggcccgaatttgatccaaatcggagaaatcaatcttaatctgatcaatctgcgcctttttttcttgaatgtgatattcagcaatccccgcgtcaattgccttaagtacagcttgatcaataaatcgcggcttaatcgaccgacctagtttaaattctgttcgcgccactctatctaattcatggagaaaattatttaaattaacccgctgacggctgatttgttgatcacaatgaatttgccattttccttggtaaaaatgatactttcttactgcatcaatctgatggtcagctacttgttgttgtcgcagataaaaaacactgcctacaaagattggcttttcaattatatcaggcttgcccacaaacgcactgtaatacgcaatgccgtattttttagcatccagcagctccagccacacgtaacgcaacagttgaacaaataacttttcattcttatacgcgtggtgctagttaaatcgttttagttaataaaaaagtccaatcttgttagactcgacttgtaaatagtaataatagaaaagagtctgatctgattgaactgccttaagcttaagcgttttagccaccatttacaagttagttttaaagatttagtgataatttgtcggcactggtatcgtttgtatgcaccggctgagtttactcatcggcgaaatattgatcaaattaaaactacggacagtctgattttggctttacttatctggcaagctaagacaggaattgaatcacaaagaagattctgtgaatgtttcaattgtttatcacactcacgttttaatcggcgttcacgtcagctattgcaattgatttatcagatacggcaagaaatgaataaaaaggttgacctgaatggacagttcttgatcattgacagctttccggtacctgtttgccaaccaattcgaaactatcgtgctaaaatttttcgcggttatgccaacattggttataaggccaccaagaaaatttacttctatggtttcaaagttcatgccattgttagcgatgacggttacattcttgattatgtcgtaacaaaggcatcagttcatgatgccagggagacagttgaactgatagaaaatacccatccatctaattactatcttcttggcgacgaaggctatttaggcaaagaactgcatcaacagctaaaacaaatgggttacgaactttggacaccatatcgtaaaaatatgacaggagctaaaaagcacaatgatcatcaattgatggctattcgcagaacaattgaaagcgacttttcgcttctgacctattacaatgccgagaacaatcgagcacgtagtctgataggctttcaaagccggttggaaattgcaattttagcttataatttggcttattgtctagaacgatttaactagcaccacgcgtattcttattaataactttagatgaattccaataagtcgttttctttgcaaagactgctgctaactcttgcgcagtaaatttttctggatggtgtaaaacctcataatcatgatcacgcttaatctcagatgcaaagcgctgcttaataatcttttcgtctaaatcataataaagaacataatctttgagccagtcttgtaaatatacatcaatactaatgtcaaattgtcgcacatatttttcttcaaattctaacagcttttcatatccatcttgtgcgtcatcaacaccaatattgttcagtaattcataaatataaacaaaggcataggatgtactcgttttttcaaaaacatgctggcgaatcttgctgcgccaagtaaagtaacttctaagctgcccagtattcatatcatgataagttggataaaaacgcttaaaggcaaaaaattcaggataatcatcatcatagtcggccatcatcctagcctgttgataaaaattcttagctcggccacgactgggcaaaatactgtagtcataaacttctagcatctttctaattctatctggaaccagactattgttatgcttcttgcgaagattttcacttggtttaattgcttgggcttgatagcggtcatctactttatctggtgcaatataaaaatattgattctgggcgatatttacttcatcaccattcatcgccagtttaaaagcaaaatcaagtgcttttttgagtgaatcttcactaactttttctaatattgccccaacccaatctgccgccttgatcttcattggatcagtgaagccaggcaaatctcttattagtgcagccattgcaccacatttcaggtccaatatactctgaccttgcccacgtgataatatcgcaaaataaccactatcaactggtgacattaaaacgtaaacgctagtggaacctggtacagcaggcttaaatttcaaaccatatttggcatagacatatttgaagagttgatttgaatccattttgtctcctttttttcgcacgtacgttcattatatcatcgatttattttttaccaaagtcacgcatgtcagctcctcatgtacatttttaagtttcataaattttatatttttatatttgtgtggttattaacaaacaattatgttactatagtttatgtaagttattgaaagcgtttttataaaagcttcctagagaggacaaaaacttaatatgagtacaaaagaacgttattctcaagatgaattaagaaaagataatccaatgtttagccgcactcgtgccactattgaaagtgcattttacggcaacaatgtccacgaagtaaccagtgttgcagaagcttataacttagctaagaagcaatcaggcgttattgttactgacttgccaatcttacacactaaggaattaggtttgccacatggcgcaacccaattggtttacaaccacggcaagattttaggtagaactgctagcgcccgtcactttgttgacaatcctaatgaagatgctgaagcattggacggcaacctacgtgaagatatttacaaggggcatgaacaaaagtacttaaaggctactgttttagtaggtcttgacccatcattcactgttaaggctcacattatgatgccagaagatcaagccttcaaccttctttcatacatcctcaacttccacttcttcgacgatgaagctgaaaaattatacgaaaagtcaaagttctacgatgaaccagacatttacttctacttcgatccaaatgttcaagacgaagattaccctaagggcttaggcgtgtttgacgctccacataactgtgccgctgtatttaaccttcgctacttcggtgaattgaagaagggtaccttaaccttagcttgggctatcgctcaccgtcacggctacactgcttgtcacggtggtgaaaagtcattccactttgacgataaagacgacaagacctttgcattctacggcttatcaggttcaggtaagtcaactttgactcacgaaatgtacgatggtaaatatgacatcactgttttacacgatgatgccttcattatttcacgtgaagacggttcttcagtagccttagagccttcatactttgacaagactcacgactacccagctggccaccacgagactaaatactacaccactattatgaactgtgatgtaactttagacaaagacggcaagaaagtcatcgtaactgaagacttacgtaacaacaacggtcgtgttatcaagacccgctacactagtcctcaccgtgtagactttgaaaagtcaccaattactgcattgttctggattatgaaggacggttcattacctccaatcatcaagatcgatgacccagtattggcaactactatgggttgtactttagcaaccaagcgtacttcagctgaaaacttacctaagggctttgacatgaatactttggttattgaaccattcgcagacccattcagagcttacccagtttcaggtgactacagagacttcaaggaattgttcactaagcgtggtgctagttgctacagcttgaacaccgacgcatttatgggtaaagacattcctaaggaagttactaagaagttaattgaagacttagctaacggcaatatcaaagacagtgacttcaagccatttggtaacttcaagggtgtatcatacttacctattgaaggctacgaagttcaccttgaagacccagaataccaaaagaccttgaaggatagaatgcaagatcgtttgaactggctcaacaagtacgatgaagaacacccagaaactccaattcaagatgaagctaagaagaccttggaagctatcatcaaggaattgagctaatattaaggaaatgaattagtgtctcattcaattaaaatttaatttcttaatgacgaaaagacgagagttgaaattcagcaatgtcattaagttaagacattgacaattaatattagacttttaaagcactgatttaacatttaattggttaaattggtgcttttttcgtacaacaaataaggcatagcacagattctgcttttttaagctacgcgatataaataatatacagctgatttgggcttaatatttctcttgtccttgcggcctggtctaattggaatggtataatagctgatctgaataaggatccgttcaaaatcttgcgttaaagaagaagccaaatacatgctctgaataatcaagcatgattgcttgaaattgatggcatattgatacttgcaatgcttttgcggaatataggcctgtgcatcaatttgactgattgcattaaacataatcatatgggcataaatttccatttcaataaatttatcttgtttggaatggaactgtacactgcctaaagaatacttcaatttcttgaaggaggtctcaataccccaacgcagatgataaagctctttaattctttttagcggataattttttcgatcaagattggttagcacaacttcccattcttctttgcctgatttggcatcattaattctaaatttgcaggctcgaaattttattgtgcataactcgccaaaatcccagcttagatcctgggtatttttagagcgatacttaatatattggcgataatgatgctggacatggtgaatattctcactggctttatgcgtgatgtagtaatagttagaagtagttaccaggcaggaaatctcacgatcacattcttgatcaggcaatgtcgttatttctttaactccgccttgtccagccttagttcgtattatgtaatgacagttaggcaggcgattgcagttttcaatcatattgaaactagtgtagccacgatccattgttacaatatatggaccacaattcaaagctttaagcatttgaacagccgctttgcgttcatccatttctgatttaggctgaaaaatacaatcctggtaggtattattcaatagatcatataaggcattaacgtgaatttgacaatagggtttctttttatgagaagaagcttgtacaatgttattcgatttcggattccagatttgattaaagtcagagccatcaatggcaaacaaacggtagtgatgatcaaaaagttgaatattaaatagattttgattaaaaacagtcagaatatgtttaaaacaagcaggagaaagctggcttttgcgttgaacataggcagaagtactaactactttatcgttctttttagttgcatcttcgccaaaagctctaaagagttcactgtttaaattctgaccttgcatgttaattgtagttttaaggactgtcgctgcatctaaagtgcgtttcctggtaaaagcatgaggattattaataaaatcgtgaatatgatccccagtattattgataatttgatcaagacgttctagaatattcttatgaagggctttcataattaacaccatctttctggcaataattttgaaggtttaaaatatataatatataagataggcgaaaaggctggtcttttcgcctttattttatacaaaaaaagagatcgaatccaaatgattcgatctctaaaaaagcacccttaattgtcaatgtcttaacttaatgacattgtgaaattcagctcccgtcttttttattgctcaatgtaattttgcttctgtagtttggcatctatcagtttataaacttgcactttattctcttgtgcaagttgtggattatagttatgtgctatttcaatgacaatagccggcaattggtagattatcttatgaatggcatcactatttttagggtctaaacttgaacaaatctcatcaagcaaatatatcttcttagaacgaattagacctctaactaaagcaagtcgttgtgcctgaccacctgataaattgttcgcgtcatctgaaattaatttatctaaaaaatcattgccaaactcatgaatcagtcccatcttttttgcttcatgaagcattagatcatcaggtatgttttgcagaagtgatagattctccctcactgtaccttggaataaccagattctttgcgagatcttgatgaaatcggcaggattaatttgatgaccagcaaaggtgatttcaccgttatacttcagattattagcaatacaattaattaatgtacttttcccaatgcctgaagccccagtaacaatgatcttgtcatgatcacgcaaagttaaatttataccatctaaaattttcttatcaccatatgaaaaagacaaatcttttattttcaaaatagcttgagagtcatgattatcttgtttaacactttcactttcttcaaaattatagctttttatttttctaattgcatcggtgctatgaatttgagtctgatacaaagcaattgttcttagatatcccacaaccctatcagctgacaaacttaaagttataatggccgctaccgttacgttaaaccagcctctctgcataaaaagcaagccaataaaaattggtagcaatagtgtaactaaagagattaaccatgcaatgaattgtacctggaattgacaattattcatcttacgatatttgtcttcctcattaaccaagattcgatcaaatcgtttaaagaaaagatgtctgacaccaaaattcagtatttctaagcgtccttcaaatatatccttcattgcctgaatcaactgtgagttagatttattccatttttcggttttctcattcatcctcttcttgccaatatagcttggaatcagggttagcgctgaaagaagcaaataaataattcccaaaatcagattagtttctacaacaactattgccgatgcaaccacattaaatacaaactgaactatgtcagttatcccaaagaaatatttttgttcaatttctttagcagtaccactaatcgaattgattacatctgctcctcttgcttgcttcatgtctgaattagcaaatttagaataaaaatattcttgctttaaagcaatatttaatagcatcacaattctattttgaaccaaataaaacaagagcatggctatgtagactatcagatatgcgccaaaggctaagccaataaatttataaacgtggtcaatgttactaaaattgatattagttaattgtccaaacagtacagcatttaataccccttcaaatgctgaaatggccgataaaaccagaaaaactatttgtaaatatattggaacatgttttactacccatttaaaatttatttgttgtgtgttcattgtttaatacccacatatttctcataatcaacaagccaatcttcatcatttttataagaatgattcatacactttttaaacccaattgctttaaatcatcttcatctttagtttctaacaattgtcgctcttctagagacaagtgatacttattcactaaggcatcaatattctccaaagaaatatttttaccatcagaaagatcctttcttcataccttcagacattactatacctcctattttctctcgttaagtaatgcataattttcaacttgcaatttactgtgtatgggattgatatcaatgcttcccataattccccaaatgcttataataataacagtaagtattctcttattttttaatttcaaagccaggaattcattatgtacggtcaaaaatttaaagcacttcgtcttcaacaacatatttcactagagcaagctgctaacagagttatctctccatcgactttatccagatgggagaataataagattgatattcgcttcaatttagttattaagcttttagacaatattcatataaacctaaaagagtttactaattactgcaaaattaatcatagtaatccatttgttgcgaaagtggctatgtactatgaagccaacgatgatcgtcatattttgcaattaatacaaagcaagaaaaaagaataccaaaattcacataatcaatttgatttacttctactagctatcgcatgtaattgttattacgatctaactgataacaatgttttcccagtgagctatcaaaagaaattattctacattttatctaacattgaatattggacagagatgtacatcaatgtttttggtaacactgtttttctctatgacagcaaggaactatatagtatttcaatcagaattcttaaaaatttaaattctaatacatttaatgattttcaagaatattattatgctttatcctctgtcatcaacgccctaaccgctctaattatcaaaaatcccaaattagcatcacagcttttaactaaaatagagaaagtttcaattcctaaaccaatctcttacttaaaaattagaactaatgtcctcaagtatcttttagattaccgtttaggcaaaacagatgaaaagcttatctcaattaagctagaaaatttaaagtggttaggattaacagatattgcaaaagacttaactttcttctttaaccgtataaaaaatgatcgttcacctctttcctaattcatttgcctattatattaccctcatttttatctaattgatttttctttgcaaatatgcaaaattatttttagcaagaataaaaaagcctattaaatctaggtgtttacaaaccctgatttaataggtcttttatgcgtcttttttattgctcaatgtaattttgcgccttagttaaaatatccatcttctcatgttcagttaaatacttttgtgcttctgccaaattgacccatttactagctaaaatttcttctttttgaatgttaacctcttgtcctgcaacatagctagcaacaaaataaactactgtcttagctttatcaacagtcaactgatattctgttttttctctaaaagtaaagtcaaaattcggctttaaaccaacttcttcaaaaacttctcttctagcagcttcctcagctgtctcattattttctaaatggccttttggaaagccccaattatgatttacgacgctctgcacgatcaaatatttcagctcgccgcttctacgttctctgtaaataactgcacctgcagaatgttccatcttcatttttgtcacccaacctttatattgcataattattaaatatttattaacgtatgtcaagcaattgtaatcaaaaaaatgaccagatctttgacgatctagtcactttattcgcagacgaaattattaagttctattggtagaatattttaagttacttcttcaagttcttttcgcagtattccttgaccttgtcatcatcggccttaagaatccattcaactgcagcctcagtcttcatggtgtctcgaccatttacttccatttcgtggtcccaaatagcgtcacgaataggcatttcattacccttagcccagtcaaaaacttgatccatatttctatcaattaatgcagtttcttcaatttcttttgcatctgccataattaaaagcttcctttctgataacgactttattgtagttctattagctacaactgttaacaaaaagggacttttttatttaaattctaatttttgccattaactgcttcatcagccttattcactacactaaccgcattaagtgaacgaggataaccaatgaatggtacgttttgttcaatgaccttcatcaagaattccttgtcattgcctaatttgatatttgcttgagcatgggccatcaattgaggttcacagccaccttgagctgcaatataacagaaggtaatcatttcacagtcattgtcatccaagccttttctagtgtagtaatcgccaaagcaattatcaactaaccacttattgattgttcccttcttggcaaaacccttcatttgtggaccaaacaagcgcatttgagtttcctcacccttttcaaggcgattgtctagtgtagtagttgcttgacccgcaagaggtaattcaacgccgcgcttagttaaaacatcattagtaatcttgaaaaatggggaaactctacccaaacctaaataatcaaccgcttgatataaacttccttagcttcaactgggttaacaccattgtctagtacgactggaagcattatttcatattcttccttgccttgcatccccaacaaataagctaaagttgacaacatcttagtccggtcgggcaaatcaacgtctttttgcacttcgtcaaaagcaaaatgattaattctttccaaagcttctggatcagtagccttcaataagttggcatgtactctttatgcatcttctttaattgacataataaattcctttctaaacgcttatctctactatttatttaagtacgattgagtctaaaagaaaaatatctattttttattctgcaatataacttattcttatcaaaaaaatatcctaaaggctttttgccttcaggatatttctattaggttatttaattagtttttcttgtctgcttcagcatcatggtatgacttaacgatttcatcaactaattctggatcatctttcaaatcagtagtttctacaatgacatccttcaagtcttcatctttaagcatttgcatcaacttaacgctttccttgtcgttaggttcatcaaagtgataaattctaccaacagtttccatcaatgcactgtagtccaaacctctgtccttcaattcacggattggacggataaatctttcattgtagcctaacttacggattggagttctaccaacacgagcaatatcatctgaaatatatgggttttggaatctgctcaaaatcttgttgtggtattcttccaaactttcttcggtgaattccttgttccacttgtggtaaagaagtgaacgggtttcactcaagacacgcttaacttgctttaaaacaaatggatccttaatagcatccccaatagtgtcatagccaaggctcttgccagtataagcaacagttgcgtgtcccgtgttaactgagaataactttctttcgatgtaaggttcaaggtctggtgcatagtcaacgccctttaacttgatatccttgttcttcatttggctttcgtcaataacccattccttgaagtcctcaactgagacaaacaatggatcgtcattatgttggataggaacaattctgtctacagctgcgttagggaagccaatgtacttgtctagttcaggcttaacgtcatcgtccaagtgcttataaacttcttcttttaagtgttctgaaccgccaatcatgttttcacaagcaatcacatcaagtggagtagtgttgcctgattgaattctagcagttaatcctttggcaattaatggagcaatgattgccaaaatctttggaccaatggcggtagttatcatatcggttgatttaattgcttcaactaccttgtctggatccttagcattgttaattccatcaacatttgaaacatgaattctcttcttaccaggtgcggctaattcaatgtcatattcaccacgcttgtttaattcatcaataatagtttcattaacatcaacgaagtcaatgccaaaaccattatctgctaaagtttcaccaataaatccacgaccaatattacctgcgccaaaatgtactgctctcatgtttaatctcctacgttctttaataaatcaataatttcttctggtgtttgtgcgtctgcaagctttgcaacgttggaaacatcactacagaaaatagcaatctgtgacaaaatatttaagtgttcattgttcaaaccagcaatcccaaagacaacggttaccaattgctcggtatcatccttagggtcactaaaatcaacgcccattggaatttggactaccgaaattccagtttttttaatgtgcttcttaccttcgtcagttccgtgagggatggcgatgaaattacccatataagtcgacacatcttcattacgggcaagcattgaatcaatatactctggttcgacacagccgccatcaactaataattgaccggccattctaattgcttgatcccgcgttggtacgtcttgattaagtttgatcatttttggatctaattgtaatgccatttagctcatccctttctaattcaacttttgaatagcttcgccaagctttttatctttaagtaaatcatcaacaactagggtttgaatatcactgtatctgacagccaagttcttattagcagctggagtaacaattactaagtgacttggatcatcagtcaattcgttgattcttactgccttaacaggagtagtcttaccagccttcttaattgcgtcattgaataaactagttgccatagtagcggtacctaagtgttgatcgtgacggatgaagtccacttctttaactttactgaagtcgattccttcaagtgaaccaaccttcttaactggtttttcagcctttggcttatcttctacttgagttaaagctttgaagctagctacgattgtgtcatatttcggactactcaagaagttgccaaccgccacgtgcattgcatgtggagtcttttgtaaagcgcggtcagctaattcttcttgcgtgatgatcaacaaaccatcttcatctttcaagtttctaacagcggtattggttactgaaaccttaatgccagccttcttgaatttatcacgcaaaagtgaagcacccatagcagatgaacccatacctgcgtcacaagcaaagataattttcttaacattggcatatgacttaactgattcatgtgcatcttcagcttccggcattgattgacctttagattgggccttcatggcttgcatttgggcttgttttgcttctaactcatcaccagtactcttgtcgtttttaagaataattgcggcaataatgaatgaaacaactgcggcgccaagaacaccaacaatattaccgaaataagcatcctttgcggaaacaagcaagatagctaaaattgaaccaggtgaagcagctgcttttaatccaccaccaagagtagtgaataagaaagtaccagtaacaccaccaccaatagcggctaaaatcaatgatggtttcattaatacatatgggaagtaaatttcatgaaccccaccaaagaattcaatgatggcagcaccaggagctgagctctttgacttacccttgccaaataaagtaaaggcaagcaagattccaagtcctggacctgggtttgattccattaagaacaaaactgacttaccaacttgtgcagcttgttggatacctaatggaactaagatcccgttaccaatagcgttgttcaagaacaaaactttggcaggttcaataatgatgttggctaatggtagtaagtgaactctaataattgcatttactcctgcactagcccattgactgccaacttccataatcggtccaatgataaagaaggcgaaaatcgcagcgatcatgcctagaataccaagtgaaaagttattgtagatcatttcaaaaccagatttaatcttgtcctggaatacttgatctagtttcttcaataaccatgcactaagcggacccataatcatggcacctaagaacattggttgatcagtaccaacaattacacctaatgtaccgattgcaccagcaatggcaccacgttcttcataaaccatgcgaccacctgtataaccaattaacagtggcaacaggtaatgaagcattggttgaactaagttattaatttctttgttagggaaccaaccgtgtggatacataaagaatgcagcggtaagtccccaagcgataatggcaccgatattcggcatgatcataccggataaagctgtaccaaatttttgaaccttcactttaacagaagatttactttttgcttgagccattttcttcttcctctctcatcaacttacatttttattctaagtcaatcagtaagcgcttacaatgaaatgaaaatagaactctggcacacttttgtgccagagtctgagtttacctattctattaagcttttgaactattggttacctagtaaccgatctttgaggtcttgtaaaaaaagtgccgcaattgcttctttaatttctttttgactgccatttgtaaataaatctaagttttgactagacatgataatcatgctggaaatagtactcattacccgctgttcgggtgcagtaagattgtctggtgccagcatcaaaagaactcttttgacttgaatggtatcatgatccattgattggagcgagatttcattatctaagtcaaacatggtaaatgaacagcgtgtaatttctggactacgtgtgtgtagcaatgcgatatggctgttagggatgccaactggtgccattcgtacacgtttgagaagatttttggcaacgggcatttgcttacgaattagtgttgaatccgaatgggctaaacattcctgaattactgcaattaagtcttgcgaattgtattccagttgttgaatcttgattccgttgactagctccgagcaaaataatgtactaatcgatagcttagcaagttgttcgactgaatggggatgtttttcttcaactacctgtttagctggaactggttgaggatatttttgttcataatcttttaagtaagcgcggatttttattaattcatcatcaagcagtaatggactaacaagtaaataatctcttgagaagcccttcaatctcaaggttgaaaaaataagattgtaatttgacaagtctatttgatttaaggcagaaacacggctggttttgacttctttgatttcagaaaattctctttttagtttggcacctaagattgccgacgttccaatgccattttcacaaattactagggccgataaattacgctgctgattgcgactcgtgtattcattggcaaaataaagcaagatcaactgcaactctgacgctgtcaaataattttctggaaacgctaaatgccaatatttttgaatagctagatataaatcaggaaacttttgactaaggcctgccagaatttcaataggtgtatctggtaaaagagctactttatgttgtactaaaccaataacgtgtttcgtcactttagtcataaaactatgatctttttgaaaatcccaatgcatttcttcagaaacgtgttgaacgaattcttttactttgactgagattgctaattcgcgctcattataagtcaagtaagtgttgtgataatcacatgataataacttattagctaagtatgagacatcattttggtcaacctcaacttgccgcttttgcgcaaacaaggccataaaacggtaaacataaccctgatatttaagtgaatcagcactggggtggataaaatctagcttgcatcccgccagagttctttttatcgttaccgcaaaagttaaaattaactcaatcagcttttggtcactgtctagcttaattttaccaaacacgctttttttaagacaatcagcaacctctactagcaaagccttatcaatcattgtcaaaaacatgtctttgcttgtcgtttcattatgcagatacttaaaaaagttatattcattgatctgattgagcataatatcaactaaaacctgacgccgtattttttcaggcgcctgaattaacagtcccacaccctttttgcggatcaagtcaatatgatatcgttttagcgacctttcaaccgtattcaaatcactttgaatcgttgcttcactgacattcaggtcaagcgcaaattgaataattttacatggctccgtacttaaaagcaacttagctgcaattatcttctctcttttagctaccgaaattacattttgactgtgagattgttgcacagattgcttaatttcttgtaattgctttgaatcgccagataaaaaatattttcctttttgattttcaattttaaagtcgttcttctttaaatcgccaaattcgcgataaaccgtccggcggctgatctttagactctcttcaatttgtttgatacttaccccactcggatttcccaacaaaatttgaagaatgtgcttttgccgttgtgttaaaaacatcccatcatcctcgcttacgtttaagtttattatacttgaacgcaaaaaaagaagacagatctcaaatctgccttcttgaggatatttatttacatattaattattcaacagtaacactcttagcaaggttacgtggcttgtcaacatccaaacccttatcctttgaagcgtagtaggcaagaagttgagttggaactactgtcaaaagtgctgacatgtagtaattaatttctggcaacacgatcgtgtcatcactatttgcgaattccttgcctacaatagtaattactgaagcaccacgtgaagcaacttcttgaatattaccacgagtaagatctgcagtaactggatcgttaatcaaggcaataactggagtgccatcttcgatcaaggaaatggtaccgtgcttaagttcagctgcagcaaagccttcagtttgaatgtatgaaacttccttcaacttcaaagcaccttcaagtgcaacagcgtgatcaataccacgaccaatgtagaatgcgtttcttgattttacaatatattgatcagctaattccttaagcttttctttaccgtcaacaatttgttggataccttcagcagcgatggctaaatcatgttgtaagtcccaatccttagcatcttgattaccaagtttttcaccaagtgccttagctaaaatagcttgtaaggcaacttgtgcagtgtaagccttagttgaagcaacggcaatttcaggacctgcacctaaaagcattgtgtagttagcttcacgtgataaagttgagccttcaacgttagtcatagtcaaacttggaataccacgcttgttagcttccttcaataccacgcgtgagtcagcagtttcacctgattgagtcaagaaaataaagaatgggtgcttgctcatcattgggaagtggtaaccagcttctgaagcgtaaccaacttcggtaggaataccagtgtagtgttcaaaaatagttttaccaactaaacctgcatgataactagtacctgcagcaaagatataaaggcgatcagccttagaaatagcatcaataatatcttgatctacctttggttcaccattttcgtcaaggtagttttgtgacatgtgacgcattacgcctggttgttcatcgatttcttttaacatgtagaattcgtaagtaccctttgaagctgcgttagggtcgatgttcaaaacgtgaggttcacggtctacctttttgccatcaacagtttcaatagtgtaagaatccttggtaatgtcaccaacatcaccatcttgcaagtcaacaaaagtcttagtttggtcaagaacagaaatagcatctgaagcaatgatgttaaagccatcaccgattcccagcatcattggtgacttgttcttagcaataaatacgtggtctggttctgtgttgtcaacaagcaagaaagcatatgaacccttaaccaacttcaaagcttccttaaatgctgaaaaagcgtctaagttcttatcacgtgcaattttaccgatcaattgaacaactacttcagtatcagtatctgagtggaacttaaccccttgcaagtacttttcctttaattctgtgtagttttcaatcacaccattgtgaactagatagaaacgcttggtttcatcaaaatgagggtgagcgttatctacagttggcttaccgtgggttgcccaacgagtatgaccaataccaactaaaccttgttcatctggagtcaacttttccttcaagttagaaatacgaccaacagccttagttaagtattcgttaccatttaaatcatttaagtaaatgccagctgaatcgtaaccacgatattccaagttggttaatccatttaaaataatatctcttgcaggcttacctacaactccgacaattccacacataattttctcctttggtctagtttgctttgaagtaatggactagcttatttttattgttacagtaggtataatagtctttttgcaaaaatcggtcaagtacaaatattcaaaattggtattataattttaagcataaaaaatggctaccagaatttgctccgatagccatttttacttaagtcaattttaacttttattacttgtttttgatacccttaccttcatagcagtctctcatcaattgagaaatttgactaattaatggagctgatgggttagtaacagtgttttggtcgccataagcttcaacagctaattggtccaccttcttgtcaaactcagccttatcaacgccataatccttgaaggccatcttaataccaactgattcagccaaatcaataattttctgaactaatttttcaattaattcagcatcacttgaaccagttaagccgattgctctagcaatttcagcatagtcgctttcagcacggtaaactgagtaatgtggccacatagcaagtttttctggacgcttagcattaaagcgaatgacttgtggcaaagcaattgcgtcactgacgccacttggaatatcaaaagttgaacctacggtatgagcaattgagtgttccaagccaaggaaggcatttgaataagccattccagcaatcgtagctgcatcatgcattctctttctagcatcaagatcgccatcgtaagacttcttcaagttagcgaaaattgctttaatagcttcaagtgaccaaccacgagtgaagtcagttgccatggttgaaacataactttcaattgcgtgacctaatgcttcaaaacctgaccaagcaattaaacgtttgggcagcgtttgcacaaattgatcatcaacaattgaaacatcaggtgttaaagcatagtcacataaggtatgtttaattccagttttggcatcggaaataatagcaattggggaaacttctgaaccggtacctgaagtagttggaatacatacaagttggacaccattaatctttgggaaacggactactctttttctaatgtctaagaatttttggtaagcctcttcaaaactcatttctgggttttcgtagaataagcgcattgctttagcagcgtccattactgaaccaccaccgatagcaattacaacgtctggcttgaagatgttcattctgtgaacaccatccttgatcacatcagtattaggatcaagagttacagccttaaagacttcatattctttttgacctaaacgcttagaaatgatatcagtaacttcatcagcaaagccttggtcagctacaccttcatcagttacgatgaagaaacggttaacgtttggcatgtgacgaaggtagttagcagcgttatgttcgaagtaagtctttgatggtacctttacccattgcatgttatcacggcgtctagccactgttttgatgtttaacaagtccttagcaccaatgttgtgtgagaaggtattggcaccatatgaaccagtacccaaggtaagtgatggcaacatattgttgtaaaggtcaccgataccaccgagtgcagctggtgagttgactaagatacggcaagcatccatcttcatggcaaattcatcaataatcttcttgtcatttgagtgaagaccagcggtgtgacctcgaccaccatagttcaataaatcggtacaaatcttaaatgcatcgtcatggttcttagcacggtacaaagtgaagactggtgaaagcttttcagctgatagtgggaagtttctacctacgcctttatattcagcgataattactttagttgtctttggcacatccacaccacaaagcttggcaatttcataagctgacttaccagctactggaccagcaaccgtaccacgacgaggatcaataaagtgttcctcaaacttcttaatttctcctttgtttaagaagtagcagttccacttcttaaattcttctttaactttgtcataaatttcagtatcaacgacaactgaattttcagaagcacaaaccataccgttatcaaagttctttgataaaacaatgtcataaactgcacggtcaatattagcagtcttttcaatgtaagaaggaccattaccaggaccaacaccaatagctggcttgcctgatgaataagcagctttaaccatacctggaccaccagttgccaaaatagtttgaacacctgggttagtcatcaaatcggtcgttgcatcaaggcttggttcttcaatccattgaacggcatccgcaggagcacctgcagcaacagcagccgcacgaatgattttaccagtttctacacaacatttttgagcctgtgggtggaaaccaaagataatggtatttctcgtcttcaaagcaagcattgccttgaaaataacagttgaagttgggttagttactggagtaacacctgcaataacacctttaggttcagcaatcttagtcaaacctaattccttgtcttcttcaatatacgccgacggtcttttcgtgacgcaaactgttccagatattttctgaagcatacatattcttggtagttttatcttcaactacaccacgtttagtttcttcaacagccattttagctagtgggtaagcattttgttcacctgcagtagcaactgcttcacagatcttatcaacttgttcttgtgtgaagttagccatttgatctaaagcgacatgtgatttctttactaagttatcgaccatgtcgtagatttgctttttcttttcgtcctctgtaagagtctctttttgttgtgtcttagccattgtattattacctctaagatctactaattcttgtgaactaatttacaatgtcaactatagcacaataactttatttgtaaatgcatgaatttatgaaaatagtgaattaacaaagattcacatttcctcataatttcgctctaatgcaaatgaaagctattccttaattatttgtttgtgaattaacaaacttatttttaaaaaacagatttttgatatttttttaaatctaactatagagtctggtcatactaattgataatgataaaatattaagtatatgtgaaaagattgagaacattggggggcttatatgagtgagaaaaaaacacagaccgcttctggttataaacgaaccctaagcaatgcacacattcagttaattgctttaggtggaacaattgggaccggcctttttctgggggttggagacagtattcaccgcgccggtcctagcgttatcctgatatatattattgtcggtatcttcctcttcctgctaatgcgggcactgggagaactaattatgtccgacttgaacaagcacacatatattgattttattgaacaatatttgggtaaaaatattggctttatcacaggctatttgtattggttaagttggattaccttgggtatggccgaaaccacggccctaggaatttacttcaagtattggtttccaacactgaaaccttggattccaggaattattaccattgtgatcttgctgttaatcaatttaatttcagctcgtgtctttggcaacttggaattcagttttgccattatcaaaattgtcacgattattgccttcgtcatcttgatcctttacttactagtaactggtggcaaaaccagctttggtcctgttagctttgctaaccttgacgatcatggcggcttcttcgcccgtggcagtaaaggattcttacaaggatttcaaatggtaatcttcagctttattggagttgaattaattggtttaaccgcggctgaagcacaaaagccagagacaacgttgaagcgagcaatcaatcaattaccaattcgaattattttgttctatgtcatggctattttaggaattttgttagtaattccatggtccaaagttgctactaacgctagtccatttgttgaggccttaggtgctactggtattaaaaatgctagttctattattaattttgtagttatttcagccgccgtctcatcaactaacagttttttgtatagtgctggtcgattacttttctctgttacttttgacggtaaaggaaaatggaataaaacttttggacatttatcaagaaggcagcttccacaaaatgcattgactttatccgcattattgatgggatgtgcaccactaatcaccttggttattggcgatcaggcctttaattttatctcatcaacttcaactagtatgtttttaatcatctggagtttgatgattttaactcacatggcttacaggagaaaaacagcagctaatcagctaaacgattttcaaatgccaggttacccttatatcgattatgtaatcttgtcattcttcgttttaatgattatcctgctattgattttaccaagctaccgagtaccaatggtcgctgcaattgcaatctttattgttttatacatcatttccaaaatttggagtaatgaaaaagctgtttaaagcaaaaagtcgagttttttagctcgaccttttattttgcaatttttttaattattttagcaggatttccggcaactaccgtattagctggcacatctttggttacaacggcattagccgctacaacggcgtttttacctaccgtaacgccaggcaatatcgttgctttagcgccaatccaggcgttttgtttgataacaactggctttaattccagttcttttctatgctgtggatccagcttgtgattaactgaaatcaggtaggctccaggcccaatcaacacatcgttctcaattgtaatcccgcctaagtcgaccatcatcacattggcattaataaacacgcgctcgcctaatttgatgttgtgcccataatcagaataaaatggtaaccgaatctctatactagcagctattttttgaccaattatttcactaatcaattgtctaacttcacagctacaatgccgttgtgtatttaaattctgcaataatcgctgattctgttgggctagttttcgacgtaaatcgtgatcttctgtttccattattaccactcctttttcttgctctacttcagtttaaagggtaagcttatcaatgtgcaaagcttataaggtatgaagtataataacaattgtttataggtgatttaaatggaattacgtgttttaaattattttgtcgctacagcgcaagaattaaatatgacgcgagctgcacaaaaactattagtctcacaacctgctttatcgcgtcagatagcagatttagaggatgaattaggcgttaagttattcaaccgccagccgcggcacttaaccttaactcctgcaggacagtatttatatgaacaagcaaaagaaattcttactttagcttccaaaaccaagagtaacctacaatctagtgctgtcatcagtggtgacctaactattgctgccggcgaaagttttgccatgcaacgtctaatgaatatcgtcagcaacattattcgggattatcctacagttaaaattcatattctaagtggcgattatgaatttgcagaaaggcgtttagatacaggtgcagttgattttgccgtaatcattggtaatctacctttagataattatgcttctctgcagctccctgagaaggatacatggggcgttttaatgactaaggatgatcctctagcaaaaaagagtgctattacagctgaagatttagttggacgaaacgtcttaaattcacaacaagccgaaaatcgaaagtactttgattcatggttcggtaattataaagagcaaattaatatcatcggtactgttaacttgaatttcaacggtacacttttagttaaaaataaagcagctattatgctcacactcgataagctagccaatatatcagatgaatccaatctaacttttagaccaattactccaatgttaaaacagccggtaacagtaatttggaagcgagaaaccaataaatcacctgtagctgatttattcctaaatcgtttacgagcatcaattgatgacgattaacaaaaataacctagatcgaattgatctaggttattttttactttatttctttttacgactaaaacgttgcttcaatcgttgccataagcttaatgccctgcgcatatgatcagctggtacatattttcttattgctcgcaatacctttttggaatcacgtgccgcaaaaacaaatttaccatttgacttagttctgatttcaaaacgcggaatataacgtccaccaaagcggacatctgcaaccacataagttacttcattccaaggaatctgaacataatcttcaacgtttcgttcgttataaaattcaaaagctctatcgccgatcatgattttgccgtatgatgcaattcctctaaaccaggttgcatcaacagtgagatcgacttttgtattaattgacttagccatttattaaagaatgccccatacgtggaagagaacaccgacaacgaagataccgatgataatccagattggtgaaactttcttcttcaataaccacatacagaagaaagttaagagcaaaccagctaaaccaggaattaattggttcaagttgtcttgtaaagtagtaactttagtactgcttaaagctttaccgttacccatatcccattgttgaagagcggattggatacctttagcacctgatggaagcttgtcccattcgatgtaaccacccttttgaataggagtttgagaaacaattggagtgaacttgatgtttacccaacgttcaattaaggcacccaagacgaacatacccatcattgaagcaccacgggtaaccttttgaagcataccacctgacatatcactggtgatagctgaaccagccttgtaaccaaattcttgtgtgtaccataagaatgcgattctgataatattccagataacgaagaacaagataggacccattacgttacctgcaatggccattgatgcacctaatgcaccaacaattggacgaacagtgtaccagaatacagggtcaccaacaccggccaaaggtcccatcataccaaccttaacaccttggatagcgtcatcagtaacttctgcaccgttagccttatcttcttccaaagccaaggtaacaccaagaacaggtgatgctaagtatgggtgagtgttaaaaaatactaagtgtctttgtaaggcagcagataaatctttcttgtttgggtataactttctcaatgctggaatcattgaataagcgtaaccaccgttttgcattctttcatagttccatgaaccctgaaggaattgtgagtgccacataacgttaaaacggtcgcgcttggttaatttagttttcttatcagccattatataaatcctcctctatgcgttcattttaatagtcatcaatgatatcgccgagtggatcgccagtgccggcatcgccagaattattgtttccaccgttgccacccttagcttcaagagctaagtacatcaaagccattgaaaggccaatagcaccaagggcgatcaaagttaagtctttgatagcagcaagggcaaaaccaattgcgaagaatggccatacttccttacttgccatcatgttaataaccatagcgtaacctacggctacaaccatcgcaccaccgatagtcataccttcgtttaaccattgtggcatcattgcaagccaacttctaacagtacctgaagggattgctaaaagaagtgcagctgggatagcaattctcaaaccttgtaaacatacggcaatccattgccataagttgatcatacgccagttacccttcttagcttctgcgtccatgatgtgaacgatagcagttgaaatagtacgtacgatcatagttaagaacaaaccagcaacagctaatgggatagcgataccagtagcagtaccaatacccttaataccttgaccaccttcgatcaagataatagctgaagctactgatgctaaggcagcatctggtgcaacagcggcaccaatgttagcccaacctaaagcgatcatttgtaatgaaccacctaaggcaacacctaaatccaagtgaccggttactaaaccgatcaaagtacaagcaactaatggttggtggaattgccattcatccaagataccttccataccggcaagaaaggcaacaaacacaaccaaaatcatttgaatagcgttcatttatttactcctaattatttattactttttttcgtcaagtaaagtttgagccttcttcaagatagcatccatattacctggagcatctgaaggaacttttcttacatcaaacttaacgcccatcttttcaagttcacggaatgtatcaacgtctttttgattcattgataatacgttgttggcgttaacatcgccttccttatatgacattgaaccaacgttgatattcttaagatcaataccgcctttgatagccctcaatacatcttctggattttcaaacaaaagaagtgcatgagtgtttccaaatcttggatctttagcaatttcttgcatcttcttgagtggaacagtatgagccttaacacctgctggtgcagcttcacgaatcatactcttacgtaaatcatccttagctacactatctgaaacaacaattactctatcaggcttcatagctggaatccaaccagttgccacttgaccgtgaagcaaacgtgaatcaattcttgccaaaacgtacttgatatgaccatcaccaataacagtaccttctggaatgctcttcttactgcccttagcagcagctttgtcagctactggagctgcagcagccgtcttaggcattaagtcagctggcttagtcttaattccatctctaccaggttgaacaactgcagtggcgatgtgctttgcagttgcattagcatccatcattctctcagtcaatgcttgtacaaccattggtaaattcataccagcaacaattgcccatttatcatgcttttcagcaagtccatttgcttggttaaatggagtaccaccccataagtcaaccaagaacaaaacttcatcttggttatcaaatgaagcaattgctttttccattttgccacgaatgtcatctggaccttcatcaggctttaagataacatgtgcaaaattatcttgttcaccgaaaagcatttgtgcagattgtgcaataccatcggcaaagccaccatggctggctaaaacaattcctaccatgtaatttcctcctctagatcaaaaaatgaatccgcttttattatacgataaatatagactttaaaaaagtgttttttgaaaataatttcataaagtgccaatttgtttcaagcagtccaaatgccttgtctcccaagcaaagacagaaattagtctaataaaaaaagaaagcctgttttcatgatttgagtcgtttttcacaaatttggcttcctattaaaatatatgctggttggataatttcattttcataaaataacaaaaaaggaagccttccgcttccttctcccctttactccggctgtcagactcgaactgacgacatcttgattaacagtcaagcgctctaccaactgagctaagccggaatattaaaaaagagcacggcagcttcctttcctcgcaggcagttgcccaccaactactttcggcgttaagaagcttaacttctgtgttcggcatgggaacaggtgtatccttcttgctttcgccaccgtactcttttgagcttttacactcaaaactaaacataatccttctcgcaaaaaaccttccagtttgcttcgctttggtcaagtcctcgactgattagtactggtccgctccatccttcacaggacttccactcccagcctatctacctcatcgtctctgaggtgtcttactgcttacgcaaaggaaatctcatcttgaggggggcttcgcacttagatgctttcagcgcttatcccttccgcacatagctacccagcgatgctcctggcggaacaactggtacaccagcggtgcgtccatcccggtcctctcgtactaaggacagctcctctcaaatttcctacgcccacgacggatagggaccgaactgtctcacgacgttctgaacccagctcgcgtgccgctttaatgggcgaacagcccaacccttgggaccgacttcagccccaggatgcgacgagccgacatcgaggtgccaaacctccccgtcgatgtgaactcttgggggagataagcctgttatccccagggtagcttttatccgttgagtgatggcccttccatacggtaccaccagatcactaagtcctagtttcctacctgctcgagttgtctctctcgcagtcaagctcccttatacctttacactctgcgaatgatttccaaccattctgagggaacctttgagcgcctccgttacactttaggaggcgaccgccccagtcaaactgcccacctgacactgtccctggcctggcttacaggtcgaggttagagcatccttcaaacaagggtagtatcccaacattgcctccaataagactagcgtcctatcttctctggctcctacctatcctgtacatgtttaaaagatactcaatatcaagctacagtgaagctccatggggtctttccgtcctgtcgcgggtaacccgcatcttcacgggtattataatttcaccgagtctctcgttgagacagtgcccaaatcattacacctttcgtgcaggtcggaacttacccgacaaggaatttcgctaccttaggaccgttatagttacggccgccgtttactggggcttcaattcaaaccttcgcttacgctaagctctcctcttaaccttccagcaccgggcaggtgtcagcctctatacgtcatcttacgattttgcagagacctgtgtttttgataaacagttgtttgggcctattcactgcggctaaccaatctcttggctagcaccccttcttccgaagttacggggtcattttgccgagttccttaacgagagttctctcgctcaccttagtgttctccactcgactacctgtgtcggtttgcggtacgggtatgtcatctctggctagaagcttttcttggcagtgtgattaccacaccttcgctacttttaattcactcctcttcacaactcgtgttgctggttagaagcatttgactcttaaccgcacttgttgcttgaacatcgttccatcgcgatgcgtgcttcacctcctgcgtccctccttcgctcttaacgatttgacacagtacaggaatctctacctgttatccatcgactacgcctctcggccttgccttaggtcccgacttaccctgggcggacgagcctgccccaggaaaccttagtctttcggcggataggattctcacctatctttcgctactcataccggcattctcacttctaagcgctccattgatcctctcgattcaacttctccgctcttagaacgctctcctaccacgtgctctttaaaacacatccacagtttcggtactatgcttagccccggtaaattttcggcgcagcgccactcgactagtgagctattacgcactctttgaatgatggctgcttctgagccaacgtcctagttgtctacgcaactccacatccttttccacttagcatagatttggggaccttaactggtgatctgggctgtttccctttcgactacggatcttatcactcgcagtctgactcccgtgtatggatatctggaattcgtagtttatctggattcagtaacccctgacgggcccctagtccaaacagagctctacctccattatcctctccacgaggctagccctaaagctatttcggagagaaccagctatctccaagttcgtttggaatttcaccgctacccacaactcatccccgcaatttttaacttacgtgggttcggccctccagtgcgttttaccacaccttcagcctggtcatgggtaggtcacttggtttcgggtctacgtcacctaacttttcgccctattaagactcgctttcgctccggctccgtcttttctgacttaacctcgctagataacgtaactcgccggttcattctacaaaaggcacgccattgcactttaatgtgctttgactacttgtagacacacggtttcaggttctttttcactccccttccggggttcttttcacctttccctcacggtactggttcactatcggtcactaactagtatttagccttgcgagatggtcctcgcggtttcaaccgggattcctcgtgtcccggcctactcaggattctgctaggcgtgcttgagatttcgcttacggggctctcaccctctctggcttaccttcccagataattcaactatctcttacactgccacgtcgcagtcctacaaccccaaatgataaatcacttggtttgggctctttcctcttcgctcgccgctactaaggaaatcgatctttctttctcttcctgcagctacttagatgtttcagttcactgcgtcttcctttgattagctatctattcactaatcaataatgcatctctgcattgggttcccccattcggatatctccggatcactgcgtacttaccgctccccgaagcttttcgtagttcgtcacgtccttcttcggctgttagtgcctaggcattcaccgtgcgcccttttctacttgaccttactcaagaattctcttctcggtcgctctacaatctgttctctttgattgtctcggttttttgcttggattatattcagttttcaatgtactagctctttttgaggtactaccctcaaaactaaacaaagtttctcagtgtgcttccgcttgctctggatacttctcttagcattcctgctctccatatccttcgcttccttagaaaggaggtgatccagccgcaggttctcctacggctaccttgttacgacttcaccccagtcatctgccctgccttagacggctccttcccgaaggttaggccaccggctttgggcattgcagactcccatggtgtgacgggcggtgtgtacaaggcccgggaacgtattcaccgcggcgtgctgatccgcgattactagcgattccagcttcgtgcagtcgagttgcagactgcagtccgaactgagaacagctttcagagattcgcttgccttcgcaggctcgcttctcgttgtactgcccattgtagcacgtgtgtagcccaggtcataaggggcatgatgacttgacgtcatccccaccttcctccggtttgtcaccggcagtctcattagagtgcccaacttaatgctggcaactaataacaagggttgcgctcgttgcgggacttaacccaacatctcacgacacgagctgacgacagccatgcaccacctgtcttagcgtccccgaagggaactttgtatctctacaaatggcactagatgtcaagacctggtaaggttcttcgcgttgcttcgaattaaaccacatgctccaccgcttgtgcgggcccccgtcaattcctttgagtttcaaccttgcggtcgtactccccaggcggagtgcttaatgcgttagctgcagcactgagaggcggaaacctcccaacacttagcactcatcgtttacggcatggactaccagggtatctaatcctgttcgctacccatgctttcgagcctcagcgtcagttgcagaccagagagccgccttcgccactggtgttcttccatatatctacgcattccaccgctacacatggagttccactctcctcttctgcactcaagaaaaacagtttccgatgcagttcctcggttaagccgagggctttcacatcagacttattcttccgcctgcgctcgctttacgcccaataaatccggacaacgcttgccacctacgtattaccgcggctgctggcacgtagttagccgtgactttctggttgattaccgtcaaataaaggccagttactacctctatccttcttcaccaacaacagagctttacgatccgaaaaccttcttcactcacgcggcgttgctccatcagacttgcgtccattgtggaagattccctactgctgcctcccgtaggagtttgggccgtgtctcagtcccaatgtggccgatcagtctctcaactcggctatgcatcatcgccttggtaagcctttaccttaccaactagctaatgcaccgcggggccatcccatagcgacagcttacgccgccttttaaaagctgatcatgcgatctgctttcttatccggtattagcacctgtttccaagtggtatcccagactatggggcaggttccccacgtgttactcacccatccgccgctcgctttcctaacgtcattaccgaagtaaatctgttagttccgctcgctcgacttgcatgtattaggcacgccgccagcgttcgtcctgagccaggatcaaactctcattttaaaaagtttgaatgattgctcattccttatttaagatctttgtctcaaatttattgctcgcgaattgacttcgcttcttgtttgggtttttacacccgcacacttttagcgaaactttgttcagttttcaaagtactacctctgtcttgcttttttgcaaagcagacagctttcatattttatcaaaccatcatttctttgtcaagaacttttttgatttgttttttcgtcttactcaagctttttctgctttcacctgacgacatttaaatatattaccagcttatttacttctttgcaagtacttttttctttttatttgttttctttccttgcatgtctgtttttaagctctcgtcgcatctctcgaagcgactttattaatttaccttattttctccgctttggcaagtcttgctcttcgttcgcaatcttttagaaacgcttggacgcgctgtaattatttctttatttctatttcaatctacctttttctttttgcttactttatttttatccttacgcttattattcgagttttactgttttttctcttaattttagtacaaaatttttcgaaattttttcaaaataattcaaaaaacagtgttttgcctaatttttcactcaaaaatgcaaaaaaagacgtttatcaaattgatatagtcctactttagtagacagtacaaatatataaaattgtactatctatgaaagcaggactttttgtatgtctagaaaaagtaaatttagctatgaagctaagcttaaagcagttaaacaatacataagtggcgaagcatcacctgcttcaattgcgaaagttttaggggctggcaagactacactgcgccaatgggtatatgcatttaaagatcatgggccagaagcattaagaccacataaatataatcaaagatacagtaaagattttaaactcaaatgcatagctgcctatttaaatggcgaaggctcatatgattatctaacaaataagtttggtttgcgaagtgctgcacagttaaagcagtgggttatcaagtataatagtcatcaagaactcaaggactacaatcctattctggaggcttatatgactaagagaaaaaagacaaccctagaagaacgtaaacagatagtgaaatactgcaaggatcatcaatggaactacaaggaagcagctcttaaatttggctgcagctatgcccaagtatacaactggtcaaaaaaatacagcgcaaagggaactgacggcttagcagataggcgcggtcatcgtttaaaagaagctgagctatctgaaactcaaaggctaaagcgtgaaattgaacagcttaaaaaagaaaatgatattaaagaccaagagatagccttcctaaaaaaagtgaaggaattagaaaggatgtgtttgctggacagccaaaacaaagacaaatagcacttaaacaacagcagcgaaattctctttacagtttgatcaaagaatgtcaccgagaatataagtggtcaattgaatggatgtgcaaacaagccaatattgcccggtcagcctactacaaatggcttaatcataagccaagcaaacgtgaactaagagatcaaaagattcttaagcgtattaaagaaatagctgagagcaataacagcctctttggttctcctaagatgactttggctttaaacaatgagctagcagacggtgaggccaaaatataccgtagaactgtggctcgcttgatgtgcgtgaatggcatctatactagcaaggccagatttaataagaggtatcgctatcaagctgctagaccggaagaaactgccgaaaatctattgcatagagacttcaatgccactaaacccaatgaaaaatggtgcactgacattactgaagaaaaaattcctggaacaagtcaaaagatttatctctgtactatctttgatctatatgatcgtttccctgttggctatgctttaagcaagcgcaatgatacagccctagttaacgctgctctgtcaactgcttggaaaagagagcccaatagtcatgcaatgcttcatagtgatcgaggatttcaatttaccaggatgccttttaagcatgagctagaagaacatggcatgccacaatcaatgtctagaattggccgctgtattgataatggcccaatggaaggctggcaaggtttaattaaagaaatgcgagaagttctttatccgaaggcaaatagctatgaagagatggaaaaagcctttaaagcaagtattgaatactatacgcgtggtgctagttaaatcgttctagacaatatgtcatattataagctaaaatagctatttctagccgttgttgaaaacctactaagctcctggctcgattattctcagcattgtaatagctaagcaaagaaaagtcgctttcgattgttcttctaattgccattaactgatgatcattatgctttttagcacccctcatgtttttacgatatggtgtccaaagcacgtatcccatacgctttagcttggctgctaagtcttttcctaaatagccttcatctcctaaaagataatggttaattggatgagcattgatcatcaattctaccgtctcttttgcatcatgtaccgacgccttagtaactgcgtagtcaagcagatagccatcatcactcactattgcgtggactttgaagccataatagtagatttttttcgtcgctttataaccaatatcggctatgccacggaagatcttaacgtgataattgcgaacaggctgacaaactggaatcggaaaactgtcgataatcaataattctccacctacctttacttcctgattccaaccctgacggatacaacgaattagaggcaagagcattcgagctcgacggttaaaacgagaatgagataagccaacgaagaatttacagaatcttcgttgagattcaattccaatttcagtttgccaaatgagcatcgctaagatagaactatcaggaagcttggtctgatcaacatttttacgatgtttaagtccatcaggcgcataaagcttatacagcgagcgacaaatcacatttaaccgattaaaactaacttgtaaatggtgagaaaaacgattaagcttgagatagttcaattagatcagactcttttctatttaaattacttacaacttgagtctagtctaattggacttttttattaactaaaacgatttaactagcaccacgcgtaatactatattaattatgatcctcaggagcgcttcaatggcaagagcgcaggtcaggttagaaaagaagctaagaataatccagagaatataatttcatatccaataaaacaagataaaagatataaagacttttggaaaaagattgatgaaaagaaaaatcagctcgcacaatagcgaactgattaatcaaattaatttatatatttaagctgtctacttgacacggtacggatcaaatataatcattcgataaacgtctcattttatatctttagatgatcaatctttagtgtctattcatcttttttcttacgtttttcaacgccaagtaaactaatccaacctaaaccagcgagtaatgtaccaatcaaacctagtgtgtgtttgtgttcactaccagtttgaggcaataaatcttgcacggacttcggttttgcatttaatttgttagctaattgctttctttctgttttccctattgtcctcttgccagattcaatgtctgctgccttaactgggccgttagcgcgtttctttcgacctgtaggcataccttcatgcttaggattgttattagagtcatagcccttcttatttgctttagaatgattatgcttcttttcactttccttatttggctttgccggtttatctggcttcggctctggatttggttttggcttcggttgaggttctggttccggagtaggtacttcatcttgcttgtaagtaattttaatattactgtcagccgtatctactgaaaccttttccgctgccaccttactttgtgaagcagtgtagccactaaatgttggagcagtatatgcatcccactgagtattaccatctaccctccactcactgtatgtaactttgccagtaactttatcaaacgttactttttgcgtggtaatcagcttaccacctgaaggcgtaatgactgtaattattctagttggagtcttagtaaaagtatccaagtgatcatagttcttacttggatcaccttgcactgggcctgttggaacatcccttggtggagtttctggagtaacgataatggtgtcgtgttcaacccttacagttacagttggaatgccatcagcagttgcaactactgtcttagaaatatcctgtcctgaaacaatcttccatcctgctagagcttgtggatttacatctactgtttcactggtcttgccactaagcggagtttgccctacttctttgccatcactatcaacgtaagaaatcttccccgtttgagtgttgacagtataagtagcagtgacttcactattggcaaccagctttccagtaaccaagtcatatacggcagtccgcgtaaattcaacggtctgtttcttttgatcttctgaaatctgagctagttggcaattcttgatctggtgctaactcgtagttctctggaagcttcaaatcaaggttatcaacagttgagccagcaacgccagacttagtaattgtctgaccaacttgcttgttaccttcttgagtatcttcaaattcaatagttaaagttgcatccaaagtaaacttagcctttgaagaaatattcagcttgtagtttggatttgctttttcaagggcagtaatactttctggagttaagttaattacataaacgccagattcagctggaattccatttgcaaattcataagtcaaacctgccggaactgtaatagcagttggaacattaactttaaagtttgttccatcaattactggtacagtgctttcttgactaccagaaatcgttacattttcttcagctggactaattacataagtgaattgaccactttcagaaactgcatagttaggattatcatcttgcaatttcttcaatcccttagcagttaaggcaatgtagtaagtaccggcatttgttggcgcagaaattggcttaccattggcatcgacccattcataatcaccagctgctaggttagcagtattcaacatttcaccgcttactaaaccagttggagtgaatacaccgaagttggtagcttgagtgttaatcgttgcaggttgaccatcgtacgtcttgccatctgcgcccttactattaccgtcaagaactacattaagatccttttgtttaattgtgtaagtggcagagcctagcaggtcttcagcatccaaggtgacatttccttgaccagcgtattggttaagggctttttgcaagttaacaataccattggcactcagcttaatcgtgtaagtaccatcattaactggtgcgctgccagcattccaaatataatcaccgtcttgcagagcatacgtactttcggtagttgaacctgggaaagtaaagtgaactaaaatttgaccattgctgttaacttgtgcagttgttacagctgtaccatcaaatgtcttttggttagagccattaagttttgcgtcagcagtggctgcagtaactatgtagttagctgttgtcttaaatgtccacttgtagttagcaccattattaccagttagttgcttaagcttttcttgaccagcctgtgacaatttaacttggtaagtaccgacattcgttgcattaccaacaatttgcaaatcgtcagcagttaacttaagtgtctgagcttcaccatcagcggagtaaaccgtcgcatcgtaggttacgttgtacttattcaagttaagtccacttggtaaggtttgcttagcatcataagtcttgctgtcaccactattcagggtaacagtagcttcgccctggttaatgtacccttagtagttacatcagctgctacttgtgggtatgcgtagttagtacccaaagctttttcaatgttagccaacccttgcgcagataattccacgtggtattcaccgacattgcctggggtttgatcaaagatcaagtcaccatctttagcagtgtagcttaaattagtactattagtactatttttaccatacgtatatttacaacaacataatctttgcctggatcaggaacattaacttgccaagtttgtccagcttctttaggtagactccatgaaccagaaatcactttaaatcctggcgttgttgaatcacctgctgtttgatcccattgccaattaccataagtaatcgtgttattagcaacatttaaactaccagtctgggcatagaatacctgtatttgtgaatcaggtgcaaattgttgaccatttttgtcaccaccagcaattacatatttagccgttactgttctcgcttgctgttttactggaatatacaaaacagtgtgaactggacgggcttcataaactgaggcgttctcagtatatgctagagactccttaccctcactagatgtatcttccttattccaagttgggtaaacaaattggtttgctgacctggatcgccgctcttattgtaagcactataagaaacttccttattattttgagtagaaacatctttagtatcttctagactagtagcttttttatcttctgcctgtttagttgaattctgctcggttgaatttttgctagtcaaaggatcggtaccgctaacttctttttgagcagtagtatcgttatcattcttaccagctgtcgtagtctgatcatttccagtatctgtggtagtcttcttagccgactcaacctcttctgtttctactggatccgtagtatccgcatgaaccgtttgacttgtattcatcgtccaaagcaaagttgaaagcaaaacggaacaaactccaatgttcaattttctaatactaaagcgctgcttgccttcaaagtcatttttatttagtctttctattacgcggttttattctattcatctattttaacgcctaacataaatcacaacaaaaagcaggcttaaattatatgcaaaaaaatcgttattttaagttgtcagtcacaacaactaaaataacgattttgcttttttaatctttaattacttaaattaaacctgattccttagtaatcttcttcataccattcatgtaaggaacaagtacatcaggaacagttactgaaccatcttcgttttggtaattttccaaaatagcagctacacaacgaccaacagccaaacctgagccatttaaagtgtgtgccaagtgaagcttgccgtcttcatcacggtaacgaatttgtgcacggcgagcttggaagtcagtacagtttgaacaacttgagatttcacggtacttgtcttgtgcaggcatccaaacttcaaggtcgtaagtcttagcactagtaaaacttgcatccccagttgaaagagcaactacgtgatatggcaagcccaacttttgcaataagtgttccgcattatgagttaacttctcgagttcatcccatgattcgtcaggcttacataccttaaccatctcaaccttacggaattcgtgcattctgatcaaaccacgagtgtcccgtcctgctgaacctgcttcacttctgaatgctggtgacaatgcagtaacattgattggcaacttgttttcatgaataatttcatttctgaagtagtttaccaatggaacttcagcagttgggatcaaagttaagtcacgtggcttatctggatcgtcattatcaacgatggtataaacatcttcgtggaacttagggaattgaccagttccttgcattgatgcatcgtttaccaagtatggtgggataatttcggtataaccttccttagtgttttcatcaaggaagaagttgaagacagcacgttccaaaagcgcaccagcaccgatgtagtaaacaaaacgtgcacctgaaacctttgaagcacggtcccagtctaagatgccaaggtcagtaccaatatcccagtgagcctttggcttaaagttaaattcagtagttgggtgccacttacgaacttcttcgttgtagctatcgtccggaccaattgggtctgaatcagctgggaagttaggcaatctaagcaagatgtagttttgcttttcagttaattccgcaacttccttatctaagtctttgatttccttacctacttcacgcatagcagcaattgcatcgctagcatcttctttgttacgctttttttctgcaatttgcttagaaacgtcgttacgcttagcctttaattgttcactcttagtcaaatccttacgacgcttagtgtcgatttcaactaattcatccaattcttctggcttaatgccacgcgtagccaatttcttctttgaccagtcaagattctcacgaatcaccttaatatcaagcatataaaacctccatgatatgcataaaaaaagagccgacttatccctacacttgggacgaatcggctcttacacggtttcgcggtaccacccagcttcagtctatctagactgcacctctttaccagacgagtaacgacgtcaaaccgtgcaactattaattgcccacattattgaaatctggaagcgactatgcattcactcgcaccaaccgtgaactctctgaagcagtcttaggatttcgtgtttgcatttattttaagccattcttcttttttgagcaaataatatttttctttaaacgaaaaaagtgcactaacttgtgtgtaatcgacagtataaacatactgaaatcctagtgttttaagcaatttctgtgatttttcattatcggcaaaagttccagcccagacttctacttgctttttctttttaaaagcataggtcaaaatcaatcgtaaagcttcagtcatatagccgtgaccttcaaacgactgatctagcaaaaagccaacttctttagtctttaataggccactcttttcatctaagccgcgttcatacaattcaaccagaccgatcacttcattgttcttgcgcaagcaaacgacataactttcaggacgcgacatatattgcttcacgccattaaccgcctcagtcagattgcggtattcctcaaagccagccatcttgtggtagcggggattgccaccccacttcagtaattgctgcgcgtccctttcttcaaaaggtctcaaatatattctcttagattcaagcattagttacccatcagcttcaagagccactttgcaccaaactgtaggcctatactataggccgcaattgtccatggcttacacaaaataataatccaaaaataagtccaaaacttcattttagtcaatcctgctagcaggcaaagcacgtcatcgggagctgctggggcgagaatacataatgcaaagaaccaattaaatttattctgattctctgtccacttcatatatttatcaagcgtttcttccgaaacaatatgcaaaataaagggccggccgtagtgtctagctaaaaagaagttgataattgagccaatacaaatccccacgtagttataaataaacccagcaactgggccaaagaagaccacgcctcctaataaagacacgcccccaggaataatcggaataactacctgaacaatttgaatcaacacgaaaataatcggaccaacaatttgtttattagccagataagcccgcattttagcttgatcggtaaagatccccaagcggtaccaataaatcaccagcaacacgattgcgactccacaaactatagttgcaatattgattaatttacgactagccttagtcgatagatgcattttctcgccttccttcatcgcctagtagttcaattttaacaaaaatccagcccagataccgtaaacatgcaaatctaaaaaaagttttattattttagctactttgggcagatactatataataaagttaataagttattagaaaggtaggcatcttatggttgtaattaagaatgatattgtttatgacaagactaaagaattaaaaacggatatttactatcctaatgatacatcttctaataccaagattttaatcttctggcatggcggtggctggtttagaggtgataaagacagcgtcaaaaatctaggtattcgctttgctaatgcgggctttatgaccttcatccccgactactccttagcacctaaataccactttcctgctgctcatgaagatgcattgcactttgtcgactggctgttgaattctgaatacactgatcaagacgatatcaaaaacattgttcaaattggagccagcgttggcggtgaaatggcaattgaggttgctgggaaatacggtttccctactgtcacctggtctgctccagttgaatattcaaactggattaaagatcatcaagatactaaagcatccccagatgccgctaacgattttggcattaccgatcctgaaaagatcagacaatctttctacaagcacttcacattaacctacacaggtactgaagatgaggctgtattacaaaaattagacgctaagtcatttgactatagccatctcaagcaattaatgatgattaattccgcagatgagttgacaccactagctacagtattggattttgttaagttcttagctgacaaaaacttaggcgtacagctcctcgtaattcctggtcacggtcacgccatggcctatggtcccgattatgtagacgaatcgctcgattttttatatcaaactattaagagacaaaattaagtatgattaacatccaaaaattcgttcaagtcagaaaaaaactaaagttatcacaaactgagctttgccaaggcatttgtacccagtcgaccttaagtaagtttgaaaataatgggcaagtgccttcatttaaaattctcaagcagctttgtgaacggatggatattgatgttagcgatattatggacagcagtgagcacaaatatatcgcgcatatcctgtttgaagcggattttgcttttatcaattttgattacagtaaaatttttactttactttcacaaatcaaccccgaagtagacctaaaacgccaaacaaatcggattcattatcactatttgcgcggacaatatgctctaagaagtgatcgcaatcaaatgcaatgtcattaagttaagacattgacaattaatattagacttttaaagcactgatttaacatttaattggttaaattggtgcttttttcgtacaacaaataaggcatagcacagattctgcttttttaagctacgcgatataaataatatacagctgatttgggcttaatatttctcttgtccttgcggcctggtctaattggaatggtataatagctgatctgaataaggatccgttcaaaatcttgcgttaaagaagaagccaaatacatgctctgaataatcaagcatgattgcttgaaattgatggcatattgatacttgcaatgcttttgcggaatataggcctgtgcatcaatttgactgattgcattaaacataatcatatgggcataaatttccatttcaataaatttatcttgtttggaatggaactgtacactgcctaaagaatacttcaatttcttgaaggaggtctcaataccccaacgcagatgataaagctctttaattctttttagcggataattttttcgatcaagattggttagcacaacttcccattcttctttgcctgatttggcatcattaattctaaatttgcaggctcgaaattttattgtgcataactcgccaaaatcccagcttagatcctgggtatttttagagcgatacttaatatattggcgataatgatgctggacatggtgaatattctcactggctttatgcgtgatgtagtaatagttagaagtagttaccaggcaggaaatctcacgatcacattcttgatcaggcaatgtcgttatttctttaactccgccttgtccagccttagttcgtattatgtaatgacagttaggcaggcgattgcagttttcaatcatattgaaactagtgtagccacgatccattgttacaatatatggaccacaattcaaagctttaagcatttgaacagccgctttgcgttcatccatttctgatttaggctgaaaaatacaatcctggtaggtattattcaatagatcatataaggcattaacgtgaatttgacaatagggtttctttttatgagaagaagcttgtacaatgttattcgatttcggattccagatttgattaaagtcagagccatcaatggcaaacaaacggtagtgatgatcaaaaagttgaatattaaatagattttgattaaaaacagtcagaatatgtttaaaacaagcaggagaaagctggcttttgcgttgaacataggcagaagtactaactactttatcgttctttttagttgcatcttcgccaaaagctctaaagagttcactgtttaaattctgaccttgcatgttaattgtagttttaaggactgtcgctgcatctaaagtgcgtttcctggtaaaagcatgaggattattaataaaatcgtgaatatgatccccagtattattgataatttgatcaagacgttctagaatattcttatgaagggctttcataattaacaccatctttctggcaataattttgaaggtttaaaatatataatatataagataggcgaaaaggctggtcttttcgcctttattttatacaaaaaaagagatcgaatccaaatgattcgatctctaaaaaagcacccttaattgtcaatgtcttaacttaatgacattgcaatcaaatgagtgcgctcttttatttcaacaatatcttgaccacccaggaattgcctgaaaatgatatttaccgcttgttggcattaaatggttgtagtcaaatctatgctaaacaaggtgaaacagagaaagccgagcactattatagtcaagtattaaagaacattatggacgtcaagatcgataatattttgactacaatgcatgccttaagtattttatgtgatgccggtgaattctatggcgaacgaaaaatgtatcgtgagtctaatgcattattgcgctatgcctataagattggcgctgagaagcacgtgattttttacatggcacgcatcctattgcggcaaggcatgaatgatattgatcagtcaaaaaagaaagcaattgctatccaacatttgcacgatgcctgtgcttttgcccgaatcaaccgcaacacgattacgctaaatcaggctaaaaaattactaaaaaaattaaatgactaagatccaatttgaaatatagtaataagagtttgttcatttgattttgcaaaaatgataaaattagtataaatgaacgctgtttaggagtttcagataggttgactttggaacgaattatcaagtttatgtttgacagtattggtagctatttatccattcgaaaaattgccaatacgttaacttcaatgggacataaaatcacaccaaatacggtagaacggtatattaatgcgttactcgacagtttgattatctatgacgtttcacgattcgatattcatggaaaagagcagctaggttcgctaaaaaaaatattacattacgcgtggtgctagttaaatcgttctagacaataagccaaattataagctaaaattgcaatttccaaccggctttgaaagcctatcagactacgtgctcgattgttctcggcattgtaataggtcagaagcgaaaagtcgctttcaattgttctgcgaatagccatcaattgatgatcattgtgctttttagctcctgtcatatttttacgatatggtgtccaaagttcgtaacccatttgttttagctgttgatgcagttctttgcctaaatagccttcgtcgccaagaagatagtaattagatggatgggtattttctatcagttcaactgtctccctggcatcatgaactgatgcctttgttacgacataatcaagaatgtaaccgtcatcgctaacaatggcatgaactttgaaaccatagaagtaaattttcttggtggccttataaccaatgttggcataaccgcgaaaaattttagcacgatagtttcgaattggttggcaaacaggtaccggaaagctgtcaatgatcaagaactgtccattcaggtcaacctttttattcatttcttgccgtatctgataaatcaattgcaatagctgacgtgaacgccgattaaaacgtgagtgtgataaacaattgaaacattcacagaatcttctttgtgattcaattcctgtcttagcttgccagataagtaaagccaaaatcagactgtccgtagttttaatttgatcaatatttcgccgatgagtaaactcagccggtgcatacaaacgataccagtgccgacaaattatcactaaatctttaaaactaacttgtaaatggtggctaaaacgcttaagcttaaggcagttcaatcagatcagactcttttctattattactatttacaagtcgagtctaacaagattggacttttttattaactaaaacgatttaactagcaccacgcgtattacattgttgatactgggcttagatatcatttgttggcaaatcaaaaaaagatcgtggacatataattgaaaatattgtttatcttgagttgcttcgtcgtggatataacgttactgtaggtagcatccctaatggtgaaattgattttgtcgcaagaaagaataacgaaattttttattatcaagtgtccgaaacagtgctagatgaaaagaccttagagcgcgaattgaaaccgtttaacaagattaatgatcattatccaaaatttctattaacaatgaatgaatttggcaaaaatgataattttaacggaataaagcaacttaatattttagattggttattagaataattaagctaagattaagaataataatttaaaaaaagaattcgaaaaatccccatttgtagtgaaaatgcctacaaaatggggatttttttagataatcttgtaaccagtaactggcttagcaggtactgtattgaaatcaaagctagcaagtttgtccagttcagtattaccatcaataattgtagtaacaccttgagcaatcatcaggttcattactttatccttgtctagatccttagtgaaggttaccaagactacaggcttatgcaaagcacgcatgaaaccaatttcaaaagcactaccatcatctacattgtccatgtcatacaagaagacgccacatgtagagttaactagaccttccaggtcattgttataagtggcaaggcgccaagtcatgctgcgaatgccaccaatttcaggattcttttcatccggatcaacaaaattttgatcaaatggaaaatgcactctgaccactgtcggattttcttctaacaaggcacgagccttatcaactcgagcacgttgatcatcattgtaaaatggagtgcctaaataaaccttagcagttgaaacttgtttgttcatgcttttgtcccttcaatgtttaaaacttacaaaataaaattatttttcattttagcatgacttttttacaactaaaagcacaaatagctgtgttttcattgtaaacgctttataatagaaacataacttattaaagctaaacataaaacttattggaggaattattttgtctagatatcaatcaattaatccatatactaacgaagaatttgcaagctatgacaattctactgccgcacaaattgacgatgccattaacttagcacacgctttatataaaaaatggcgtcatgaaaatcctgagacccgcagtcgtcaattacacaagatagcagatgctttgcgcgagcatgaagatgacttagccaaaatgatgaccctggaaatgggaaagcttttgcgcgaatcaagagaagaagttgaattatgtgcttcaatttgtgattactatgccaaaaacggggtcaaaatgttggctcctactccaatcgaatcagacttaggcaatgcctattatttgaagcaatcaactggcgttattatggcttgtgaaccatggaatttcccactttatcaagttattcgggtcttcgctcctaactttatcgtgggcaacccaatcttactgaaacacgcccacaatgttccaggttctgctgctttaaccgctaaaatcatcagacgtgctggtgctcctgaaggcagcttaattaacctttatccaacctatgatcaattaagcgatattattgccgatcctagagttcaaggcgttgcattaactggttcagaacgtggcggttcagctgttgccgaagctgctggtaaaaatttaaagaaatcaaccatggagcttggcggcaatgacgcatttatcgttttagatgatgcagatccgcaagtattgcgtaacgttttaggcgatgctagaacttataacgatggccaggtatgtacttcatccaagagaattattgttgaaaaatctcattatgaggaagtgctacatacgcttaaaaacgtcttttctaatcttcaagcgggtgacccacttgaagccggtactaccttgccaccaatgaattccgaacgtgccaaggaaaaattagaagctcaggttaaaaaggccgttgacgcaggagccgagattttttaccaatatccagagattgattctaaaggtgccttcttcagacctgtaattttgactaacatcgacaaagaaaatcctatttatgatgaagaattatttggccctgtagcagaagtctttgtagttgacgatgatgacgatgccattcagcttgcaaatgattctagctatggcttaggttcatctgttatctctaacgatatcaaacgtgctcaaaacgtggccgctcaaattgaaactggtatgactgtcatcaatggccgctggattacctctggtgaattgccatttggtggcgtgaagaagtctggctacggtcgtgaattaagtgacttaggcatgatggcctttgttaacgaacacttagtaattgatgttactaagaataatcaatagtaatttttcgataaaagaaacatactaacctagtgttggatcatgaatcgacggattcacgatctggcactttttattttgtctaaaatagaaagtgaagataaagcaaatcaagtcttcagctttttagacacttgatgtcgtaaaagaaacggactgctttaccacctattcttaagtctcttcgaagtctgtgggcacttagatgccgtgtttagaaaattagaattaataggttgataaagaggtttatcttcacagcggaggttatattatggaatcacaaattattttcggtattgatgttagcagtaaatcttccacagtttgtgtggttaatgaccggatcaaacaaggcgaatcttttagaatctctaatgattcctttggctatcaaaaactttatgagcaactgaaccaatatttgataactcctttagttgttttcgaagctactggtgtttattctctaagcctgcaagctttcttagaggattatcatattaagtatttgaagcttaatccgcttaaagcgaaaaagctaatggacaataatttacgccataataaaactgataaggtagatgcttatcgcctggctttaattcaatttaatgccccgcaaaagttgcgtgatccacagcccagagagtatcatgaacttcagaatgccagtcgctattatgaagaacttactaggagtatagttactactaaaaatcaattgcaccgcaacctccaatccactttcccacaaattgaagaaatactgtctcatccatctggcagaatttattgggcgcttgttagtcttttcccacatgctggatatgttctagaaaagaatgagacacaggtaactcaaatgcttaattctatttctggaataggacaacaaagggcacggtacttaaccacaagattatacgcttttgctagagaagcttatccttatgattccaaagatagtattatcgttagagctattcaaaggaacatttctaatttgttttcactccagcaagaacgcgactatgtaattaactacatggaaaagctggctaaagcagtaaacgctcgtgctttatccatctatttgagtatcccaggggttgctagaattacagcagtgagattagtagcagagctcggtgatctaagacggtttagcacttcagctcaaattgatgcgtttgttggcattgatccaggaaggtaccaatctggtgaaaaagacagttctcttggcattaccaagcatggcaatcatattgccagaaaaatactttatcgagttattattcaaatggagacggtaaaggctacgcagccttgccatataactgattattatgacaagaaaaaacgatcttcaaatagccaaggctataagaaaatcgccattgcatcagtccataaactgatacgcacaatgtttgctcttatcaaacatgatcaattatatgattacaacatagccaccaaaaataaaagactttagctgaaatcaaataatcaacttaagtataagcaacctatggaaaaactacaagtattcataggcttatttgtggtactttcgctttttcttaaatttaaactcttatttgctttaaccttattcgcatcattaaaacaagtaaatttattttcttaaatcattgataatacttgactttgggtagaaaatacgctggcaacttaaccagcgtatttcttttacttattattaattctatttctttttaaaaagattatatccagccaaaatcgtggtcaacacgctagccaaaatcataaagtaagctgaagctccgagagaaactgcatatgacataagttgactcgtcaattgagccagcaccccagttgaagcatgtgccgcgcttgatatttgaaaaatcatataaatcaaaaagattgattcaatcaaagaaaggaagaaggccaaagtctgactagccttagtatttttcaaaatattataaataatgaaaattgggaacaagaatagtagcaaccagacaatgtaaagaataagtgcataccatgatgtcacgccagatgaaagcaagcgccctgctaaaccgaacagtacattggaaatagacattctctgcgtgtaagccgaggcacccgagtcggtaaagagaacgattagactaactaaagccgtaaaaataactgaaatctgcacataattaaagtgatgtttgcgaacattttttatttcacgtacatgattttcaatccgaggatatttttgcacaaattctcggtttttcgctttgactttactttcacgtgcatccacccggttaaagacatcggaaccaattcggtcaatcttttgcgttaatcgcttatcaaccgtatactgctcgatcttatctttacgatcacacacaatataaagccaaaccattagggctaaaaagccagtccaccctgccgctctagaaaaactcattaggattaaaagtaagactcccaataagaagactaaggtcgcatttttcctaacccacgcaatcattctttggacagtggtgttttgcttttcaggaataaattcttcccgataggctgcacggctgataatcttttcgccttcatctggttcttcaaactttgctttttggtgctgatctgtgaaaaagtcgtctcgatatttttttagattgaagccacagtttggacaaatatcatctgtttcactaattttatggccacaatttggacaagtagtcatataaaaattcccttctttttcaatctgttagtcattattataacatgtatcagaatttgaagatcaaaacaaaaaaagaccgaatcattgcgattcggtcgaaaaaattatttactaactatttttcaacattaattggtaaaacattatcaatataaggtgaatgtccatcagcaatcaaatctgatatctttctcaacattggaaattgtatgttcctagtatcatttccaaacttttgatatgcttctggagttgcatctttatgtaataattcatatcctaatcttttgtagaaattaacactttcgtccacagattcaagataaatcagctgaacacctgtatacaatgcaatcaccatgcacatggaaaagaattccatcattagtgctctaccaattcctgttccttggtattccttgtcaattgcaaaataagcaaggtttatatatggtgtatcaactttataagtaccatcatccttcttaacattctgtgttaataaccctactgttgacgagaaaaaaccaactatctgatttttgataggatccattaatacaaaagtctttaatttctgtgtactttcgaacttcggacattccttacgaaaaaaattatctataccacgattagtggaatcaaaatgtagggctaactcttcaaaatgtggacacgtacttaacgggcataatttaaatgctctactttgattcatgcttttccttcccacgttgaattactatcccatcagcttcaacttctttttgcaacttttttatagacacacgtggtactggattggctattttgtttttgaattctttaaatgctttttcatttttaaatgttatctcagcatttctaacaatacctaccataattaccaactccttttagtgtacctattaatattatacaatcataatctgttttactattagtttcaagatttattttaacaaaaaaagaccgaatcattgcgattcggtcgaaaaactatttattaattatttttcttatttcttcttttggcgaacttattaaggtcaattccctcatatgtcaacttagtagctgctgacatagtaattggcaaaatgaagaccaagatgagcaaaccaatatccacggctaaggcaacttcaatcaaagttggaatacctgatggaatcaaggctgcaaaagtaccacccaagataattgcggctgatataacaaccgtaccaatgatagcacatgccttcaagattcttgaacttggagtagtgtatccttcagactcaagttcacgataacgagtcatcaggaagatactgtagtcaacacccaaagcgatcaacataatgaagctgaagaatggtgtgttccaagtaagcattgacttaccaagaactgctttaacaatccattgattgattgaaagtgagcagagataagcaataagtaaagtaccaagaatgtagactggttgcaataatgaacgagttacgaacatcaaggcaatgccgataccgattaacatgatggcagcagttctaaggaagtcgccactggcaactgtcttagtatcttcaatcttggaactttgaccacccatagctaccttagcattcttcaaagcagtaccttggaatgacttcttagccatagcacttaattcttgtgacttcttagtagcttcggttgcacttgggtttgaatcaaagacaacaataatttgagctgacttcttgtctgggctgaggtaaacatccattgacttcttgaacatatcgttcttcaagaattccttagggatgtagaaagtatcagcggcagctgatgaacctaaacctctgaggtaggtttcaccttgacctaaaccactattaacagtgtcaatacctgaagtcaattgtggaactttgcttgccaacttaccagcgccagcactgagttgtccagcacctgtgttaagttgactgatacctgaaataagttgtggagcttgaccagctaattggccgataccactgttaagctgaccggcaccatttgcaagtgtgccaagacctgtgttcaattgacccgcgccattgttaagtcggtttacacccgcaccaagacgactagcgcctgacgaaagtgaacctaagccactgcttaattgaccagcacctgaattaagtctttgtgcgcctgccacaccttgtgaagcagctgattgaacttgcgtcaagcctgagcttaattggttcaaagcagtagctgcacctggaagtgccttgttagaagcttgagctaatttagctacttgagtctggagagttgataattgttgaagtgatgaagttaaagcacctaattgtgagctaagtccagaaacatctatagcagcattacccgtttgagtatcagcttgtgtattactaaatgccttattaatagctgcttcagccttttgctggtcttcagtagttaagccagcactgccaatggcttgaagtgctgctcgttttgcttgtgcctgagcaccagcagctttttgactagctgctgacaattgtgctgcttgttcttgtaacttcttcaaacttgcagttaatcgtccaacttgtgaagtatctaatccactaacagcttgattcaattgttgaataccactgttaatttgtggcaaagcagtttgaagttgagcgagttgttgtttgtttgaaccactcaattgagttgaaagttgtgaactcaattgttgtaattggttaaccatttgttgggtaccactttgcaagctgctagcaccattctttaagcgatttgcaccgctaactaattggcttgcaccactttgaagtgcgtgagtaccacttgccaaacgaccagcacctgtttgtaaacgtactgcaccactttgtaattggcttgcaccattttgcaaacgactagtaccaccaactaattgttgggcaccactttgaagacgacccgtaccatcttgaagttgatctgcaccatccttcaaactattggcaccattagcaaccttgttggcacccttactcaatttgcccaaacctgaacgagcttgatcaacaccgtcgttaaccgtgtttaattgattgttgacataaagcatatcaattggttcgccgtaaggttctgtaacagatgtcgcaaatgaaacatcttttgaagcttgaagttgcttagtcacttgatcaattaacttcaaattttcttcattgtctaatctatgcttgctttgaatgtacaagtatgatggttcagccatccctttagagaagtgcttttgtactatcaacaaaccttgcttagatggaactgaatctgcaatttcatcagtgtcatcgtagttcaagtgacctgagtacattaacatgaatggcacaacaacaactgctaacacaaccaagtaaataattggatgcttcaatatggcagatgaaataccatgccataacttgtcatcactttcaccagtaaatttcttaactggccagaacattttcttaccaagcgtagccataaagaatgggttgagtgttaaaagcactaccaataaaacagcaacgccgaccgcaacaccaacagctgattggtaaacggagaatttagctaaacttaaagcagtaaaaccaattaagatggatgaacctgagtaaagaattgttttaccagcattgcgcaaagcgtcatgcatggccttatacttgtccatcccttttcctagattttctttaaacttgtcatacagcaaaatgttgtagtcggtaccgataccgaagagcacgataaccataaacacttgcgtaaagtttgaaaatgggaaattggcgcttttaactaaattagtaacaattgagaaggaagtaaggaatgaaacaccaactgtcaacaatgaaataagtggaacaattggtgacttaaatacgataaccaaaacaataaagataaagacaactgtaatggcttcagtcttcttaattccctcttgaattgaagcggagaaggcgtgctgcaagacatccgcacccgttacataagtacgaagcccttgcgttttcgcggccttgttcatttcgttataaactttttcaatcgtaccatgactcttagccacattaaattgtgctacccaagtcgtgccatcttttgattgaagtttctttcttgtagcaatattggaatctggaagtaatgaatccttgattccgtacttgcttttatcattagtgaacttatcaagcgtattattaatagcctgtttatcggcatcagttagcttgccactctttttgttaaaaacaagtgctactgcataagtgtttttctttttcgagccccaattgttctctattgactgtgccacattgctttgcacattacttggcaacgtaatgttagagtgatcattagtcagctgcgtaatgttaggcaaagcaacaacggaaataatcaatattaaaatccacgcaatcagttcaaaaacatggttcttcagaaatttctgcactttcctatttcctccctatttgttgtaaatcaggtactggttctacaagccgtaaaatcatttcatgataattacgattagattcatcttctgtttcatctccaaaagacttcgatttatccaaaaaaacgtaccctaatacggcgccaattaaagcatgaaatgaaatgacactttcttttttaaaattaagtctttcacccattttaattaaatccaagatttcttgattgatggccgcatcctttggatattcgttcaaatgatacagaatacttgataaagccggatcgcttaataaaaagtcgcgcacaacatccgcaaacttaagcaatgcatccctacctgacataccgattagatcgttcatcaactcatgacgtaagatcttaatctgtcttgcaccaactagtgatagcaattgtttgcgtcctgaaacgtaatgataaagcgactgtgagcggacatcgagcgccttagccaatgctggcaaagttgtagctgtcagtccttttttagaaattaattcagtagcttgatcaattattttatccagatcaagatttcttttctgtgccattttcatccctcctttgtcttagcatagtaaataatatacacctacagtgtgaagattacaatctacatagtgtaaataatttattttttctataaaaaaataatgaagccttctcggacttcatcatttccgttacttatgcttttttataaaccaagcattaaccgttttgcccaatttattaaaattcttgtgttgcgtgctccaaacagacatacagtaagcacgtccgttagtctgaacaattgcgacagcaaaatcatcatcaccaattgcataaatgccgccacttaagccagaaactaaacttggtcgctctttagctagggttgctaaaactcggctagcatattgccgatttaatacccgaccttgatacaagccaatcattgttttagctaaatcattagctgttgtctggccagtcatatttgagttgaccttagtttgagtggcacccatttttttagcaacttggtcaatattattaactccaatttttctagttaaggcactagctgcagttttgttacctttaagcattgcgctacgcaaataacttacaccataggtaataccaacttgaaacatcttatcacccttggctttgtcttttttgctaatcttaatcgcagttcgcgaccccatcttgcctttttgttcttgctcatacaaggcgatcagtaaaaataaccgcattgtttttcctgcgtcatgagccttattagtattaaaaactacggcaaagtgactagagttagttaaatcctgtgctactacctggaagctatcatcaatgcccataacttttttgatttgcttgactagcttctgattactgcctttttgagctttaacatggttagaatattcaatcgaattaaccttgggctccttaggcttttctaattttttaacctttggctccttggtcttctttttattcttagcgaccttgctgttatttggttcaacaatctttaactgcgcgttttccacccgctttatgtttgatgtatacaaaatgaatgcaaataaagtcacaattaaagaaccaattaatattttatgtttcattaaaacgcctcaattttagaagaaatgatgccttttcatcaaaatgactaaccaaaccattaaaacaaccatcaaaataatgattaaaacccagtcaaatgaattttttaaaattggtagactaacattcatcccataaaaaccggttaaaatagttggaatagttaataccaatgaccacacagttaagaattgcatggtatcattcaaattattgttcatcatattattactggtagctgataaagtcttagttacctgctgggaaatctgcaccatttctgcagactggcttgattcaatcaagacgtcatccaagcgttcactggcttctttagtgaagtctaatttgctgtgattcaggccatgcaacatgattaaatccgtctgaattgaacttgataaataaactaaacttttttcaatattcgaaagttccaccaaatctttattgttaatgtcatcagacaacttctgatctaggctgttacgttcaacgtcaagttgcgttacagcacgctggaagtattgtgatgaatataggaaaaagagcatcaacaactcagtaacatctttagcttcagacaaacgctcccgcatatgttcatcgttgaattcatcaaacacatagctggttgattctgtatggaaagtaaagatattttcacccactactaaaaaagtgattgggtgtgaggtaaagtgcttaatcgtgttggtcggccaaattggcacatcgtaaacaagcaagtggctcttagtatggacgtcatagtcatagtgaggacgttcgtgacggtcagaaatataagagataatgtcaggcgtaaaattaaaatcctgctgcaatctctcactgtcttcttcacttaaattattgatgtcataccacttatactttgttcttaccggaaaattttgttgtctaatcaaccagctcacctcaacttttattttattacctagtaaatggtaccatttttctcaattctttttccacaaaaaaacagaccttacggtctgctctttgaaatctaattgctatttaattttattgcttccaagcagcatcaaatttttgcttaccagtattaatttggatgttagtattttgacccttttgggctgcagcaaagatattttgcaaaatgctgttcaattggttgtatgcagcatttgaattcttagcaacaggaacactgtacaagttcttcatagcatcttgaagtttagcaggaagcttaatgctcttgttattcttgtattcactagattcgattgcactattgtttacaggaatgtaaccagtagcattagcccacttaatttggcttgacttagatactaagaacttaatgtacttaaatgcagcagctttttgttcagcgctagcgtggttaaacatgtaaatatcagtaccttgttgcatggtgtatttgccaggacgtggagcaacatcataagtaaacttgttacctacaccttgcttaacaaagccttcacctgcagaagtaccaacaaacattgcaaccttttcgttagcaaatggacctgaaaggtagtgttctgaaccagctactctgaagtaacccttcttaataccatctgcatagaagttgagaactttctttgaagttgaaccactgaagttaatcttatcagtaaagttcacgccttcgtccttcataccaagagtgtagtagttggatagtgaatcaaaaccagcacctacaactttgtggttactcttcttgtagatagtttctgaaacatccttaagttcttccatagtagttggaactttcttgatgccatatttcttaaacatggtcttgttgtaagtcaaagtttcaattgacttgttaaatgggataccgtattgagttcccttaatttttgcaccatcaagaagttcagttctaatgtcagatgcctttgcactgccccaaccaacattcttgttgttgatatatggggtcatgtttacaagcatcttgttttgagctgcgttccaaagccaacctggataagcttgagtaatagtaggtaagttatttggtgattgcaaagttgagttgatcttagcttgcaaatcattgtatgcaccttggttttcaagcttaacagtaattttagggttcttcttttcaaattcattagttaattgctttaaagtagaaccttgtactcccggcatagcgttccagaagacaactgtagtcttcttagtaatctttgatggaatcttctctgaacttgatgaagaagaattgccgctctttgaacaagcagcagtgccaactagggccaaagtagcaacggcagccatagtaagtttcttactaaacttcatttggataaatcctcccaaaaaataaaactaaacaacaatatgtttttgatttactaaagcgtgattgtttgaccacgtttaggtaaaatccgttctccatatgggttctcttccagctctggatgcaatgtgtgcaccggtactaaaacagctggttgaaccccagcaatgatttccttgagttctttttcatcggcatggcctgaacagcgcaacgccttatactcaatatcattgttagctaaagcctctacaaatggtttgtaggcaggatcaaaatcccctaatggctcagcatttgagtggatatacaaaccacccttttgcagcttatcataatcggtgacaacttgccacatgtatttatgattatctgctaaaagctcatcatagctaacttctagctctggcttaaggtcagcatagtgctcctcattaggcatgtaatagtaaggatagtcttcatccaaactttcattaatcaaatgggcacgctgagcatgtaaaacgacctttcttggtgaatcggcaatgattcgcaataatcgttcaacattagtaggataagtattaaaagtgatttggcgttcaggattagccttttgcaggcgcacgatttcttcagttagttctacttcattcttagggccagtaaactcttcactgttttcatcatgcttttcttctggccaagaaacaccagtaccttcaatgattagcatatcgctatttttagctgcctgcataaagtcccgcacccaatctggatgatagccatgcaagcgaatgtcgccagtataggcgatttgcttatccggtgtcttaactaatagaccagtagcaccgtaagcgtcatgatcactaggatatatttccaggataatatcgcccaccttaattggtttcttgtattctgccgcgatgattggacgagtataagtccgatcatgacctgcagcaggaagcaagaagtcgcccttttcattcaaggctggcaataaatgagctgtaattggacctgcataaagtggaatttctggggccaaaaagttcattgccttactgtgatccaaatgtagatgcgaaatataggccgccgcatgctcccagcggtcagtatcaattggcttacccgttaatttaggatcgtaaaaattaggcacatccccgattaatttatttttaatcagagtttgataactttcatctggcaattttaactctggccgataaacttcccccaagtcaaacaatacatgcgatttgttataggccacttcaatcatcggtccaccaattgtggttaaaccattataaaaagttactgtcgttttatcctttaaggtcattgcgcactactcctcgaataatttgctttctaaagatgaagtacaaaatcaagattggcaaaacagtcaatgtggcagcagcaagttgaagttgagtttcactacctgcatcagatgcaaatgaagttaaaccattgttcaacaatctcatgctgtcttcgttagttaccaataatggccagaggaatgaattccaaccagaaatgaaacttaataaagcaacggtgaacaagccacctttagacattggcaccaaaattttccaaatatattcccaatcactcgctccgtcaatcatcgcagctttataaattgtctgtgagattgaaccgaagtagctttgcaagtagtacatgtagaaaattgaagttaaaaatggcaataccaaaccaatataagtgttcaacaagcccattctggcaatggtattgtagttagtaaagataattgcttcaccaggcaccatcaataatgataaaagtaccatttgaacaacacctttacccttgaacttcaagttaaccatggcaaaagcaccaagcaaggcgttaaacaaactcacaattgtcgttacactagctgtgataaaagtgtttaggaagtaacgagtaaatggagcttgggcgaatactttggcataatttgaccattcaaaatgcttaggaatgattgttggtggaatagtggttgtttctctaaaactcattaatccacccaaaatcatgtagataaatggaaagacagtaatgattgcgaaaatcgctaaaataatataagcaatcaaagtgccccaacgaatcttcttcatcctttactgtcctccaatcttcttcatcatcttgcgttgcaagaatgtgacaaacataatgatgataaataagacaaccgttgcggccatcgctacacctggagtaccaacaatttggaacttgttatagatgtagaacactgcagttgtggctgagttaccaacacctgcttgtccattgaataaggcataaacagatgtataaatcttaaatgcagcaatgatattcattgttaataagaaggcgatcgttggcacaagctgcggcattgtaatacgccagaacttttcagtaccagttgcgccatacatatccgcaattgtgtagtaattagggtcaatgtttctcaaagcccccatcaagataacgatgttaaaagctaaagaagtccaaacaccaaagatgataattgtcgtcaatgacatcgctggatcatcaatccagttcggtgttggtaagtgaaccgccttgagcaagaagttaagcaaaccatagtcaccgttaaaaatataacggaatacgataccaatagcgatagttgacgtaacatatggcataaagaaagtcgtttcaaagaatgacttatgctttatcctgctgaaaataaaccaggccaacatgattgaaatagccaaagcaactggcacagaaattagggcatacaaaatagtattcttgattgcccgccaaaattctggatcactaaagatatattgataattgctgaagccactccaatttagattaattaacgagccgctttgaaaactcattacaaaggcccgcaaaattggataaatactaaagaaagtaacaaagataattgttggcgctaaaaagagccacgcctttttctgattgctcttcattagtagacacgctctccttccttagtaaacaggaatactcgatcaagacgcatcttcaaattgatattatcaccaggcttaattggtgtctcaaggttgactaatgaacgagcttgtaccccatcatgggtaaacttcaaaattcgttcacgaccgattaattcgacatcatcaaccttagctgaaactgcaccatcttcttcgactggcaaaatattttctggacgaacggataaaacgtactcgccgtcagttaagtcacgtttaaaacgatccttgtctaaatcgtccacgttaatttcaaaatctgagccagtaatcttgccgccattaacctttacattaaagttatcaatcacaggattaccaacaaaattagcaacaaagtagttatttggttcaagatagaagttttgtcctaagtcatcttgttggatcacgccattattaaagagaataatcttatcaccgattgacaaggcttcttcttgatcgtgagtaacaaacaaggtggtaatacccacacttttaactaaagcacgaatttcttcacgaatcttcaaccgtaaacgtgcatccaagttactcaatggttcatccatcagcagaatcttaggttgttgcactaaagcacgagcaatagctacacgctgctgttgaccaccagataaattgcccggcttttgatcagcaagttcggtaatctgggtcgttgccatatatttttcagcaatcttcctcgcctcatccttaggcatcttttgcttgcccacagtcagaggaaacattacattctgaagtacagtcatatgtggatataaggcatagttctggaaaacatagccgatctgacgatccttaggtgctacgttaacaactgacttgccatcaaaaaggatgtcaccgctagttggattaagcaaaccagctagcatatttaagatggttgttttaccacaaccagatgggccaagcaaacatacaaggtcacctttttttacggaaaagctaacatccttgattgcttcatgaccgttatcataaacctttttaaggttctttacttccacgaatttctcatcattcataagtttcacgcaccactatatattgatttaaatttttaaatttttctattaattctaagctaaatatacgaaaataacaaataattttcatttgaaattcggggtttcaacgactttgtgaaatgcttctcagcaagtattcggcttttgttcgcatttgcttttatttttcacttatttctttttaaaaattcgggtttactaaatattgtggtaggtaccaaaaaagccatgaattagtcatggctttttgtatcataagttatctccacgttcaaattgatattttgaactattcaaggcttgacgaaccaacttgctcatcaagttcttagtctttttggtaatcacaccagcagtttcatcattagcgctagttaaatatttaataagctctctgccttccatatttttagctttttcatcaataagatcaattcggccaataccgtagctttgacaatcatcacgataggcgtttacctcataaatatattggtgatagcgtggttcaacaagcacttgtaaagttttatacaaccagtaagcactactatctgaattaaccatatgatctgccaccttatagttaagtggtgtatcctcaatattggtgtagaaaggaacatatggtgaatatgcataaaagcccatattaatccattgaattgcagccatcttggcaggaacatcatttctaatttgcaagatgcttgattcttggtttctgtctaaagcaatagaacggaacatcttttgttctttttctgaaccagatgaaaaagtgtccattggatcgtatggtgtaccgttatagtgactagttaaaaatctttgcacatcttcaacaccaatcttcttttcgggaacgcgcgtaaatggcatttcttgactagttgggtcttgttcaatgcttggattaaacaacttctgtccataccaagttcttggagtattgtaaaaagcatcagcttcatccttagtaccaaaaatatctctgaaagaaaagctaccgtcagtactattgtttaaatgattcttttctacgaattctcgaataccagctgaatacataaagttatctggatcatcaaagtcaacattttgaatcaccatgatgttaggacaaattgcgtaagaatcatcaggaacacgagccgcaacccattggtgacccgcgccagtttccagataccaaacttccttgttgtctgaaaaggcaataccgttgctttcaccggtaccatatttttcgattaattgccctaagcgcttaacaccttcacgagcagtcttcacgaatggcaaagtaatataaaccattgagtcttcgttgattccatttgctactaaaggatcatgtcctaagcagcgagcattagtagcttcagtttcagtggctgacatagcaacgttatattcgttaatgccttgctcgtcccagcgaccttctgaatcatcagcagtagggacagcagtccatttgcagccatcgccctcaaggtgcatcttaaagccgttatattttgatacataatcttcatcataatgacgggctgggtttaccacaaaaactttttcgttaatgccaccataaccgtcttcgtcacgcgcaatcatggttgatccatcgattgaagcgtccttaccaactagcattgcagtacagttatcttttttcattattgtttgtacttccttttttatttcagtaataatttttcatattattaattctactactcattaacctgcatttgccgatcaacttttgctcgaccgttattatagttaaaaacataaccgggctgcaaattcacgccgcgggccattaactcattaccacgaaaaacagcagttgcttgataaattacacgcttattctgccgcagtgctctcctaaccttagcctcaaaaatagtctgaatcttttggttagaataagcagattgcgtaaacaaattcttaggattattttggtcccctgattgattgcgtggatcataattgccgctttgatcaattccagctgagactgaataggcaatcaagtggccccgattatagatttgggtaccgttacggtgattatagtgccagccagtcggttcaacatattgccttactcgcaagctatcattagccacattgcgcttttccaaaaaggctgtattagagcgcgatgttcgattcaatgaatcaaggttagagtaaatcacccgatttatcttccatgcgcctttgaccaaagtcgacttatcatggttgacttcggtataagcgcgactgccactcttaaaattcaaattagctaatttttgataatcagttggcgatagacctccataattggtcttggcttttgatgcatcgctaattgtattagttacatgttcatcattattgccagtaaagtcacgcaaaaactggctaccatttggatcgctgccagctttagtaaaaactccccataaaatcgcgattaagacaattaatgatgaaacaaccgttccttgtttttttcgtcttcttcgtgtcatctttttcctctaactacgagcccaatcatcaagcatgcttaagaaaaaggtctccgaaaaacgcttaatcttagcaccatttttgatcaaatcacgtgctgcattcaaatcctgattatcttttctaaagaaatcttgatcacccatgattaagtaattagtcgttgctaacactgaattgtcaacttggccgcccatattgttgatcatcttgcccgcttcagcttcgttcatatgaatattgccagacaaaacgatattcttattttgaaccggattgtgccaacctaagtcaacataatccaattcgccaatagttaggtcgatattcttaatcttgctttgtgccttttccaataaatcatcagtaaagtgctgggcaaagtcatcataaaccttgatcgtatcaagagaatcctgcaaaccgtggtgagcctcaacttgagcaattccagcccgctgcatgcagtcaagcagacggttatggcgctcgcgtggataatatgtccgcgccaaacgcaatacgtcaacgtaatcattatcaagcactggtaagccatatttttgacttaaatcatacaaaaagttcaagtcaaaattgacgttatacccaatgataacgtcatcaccaataaactcacgaaattcacgaatagcctgctcagccggaataccttccttcccaatttgctcttcagtaattccatttagcttagtaataaaagcaggaacagaattattcttggaaaacttcaccaaattagtatattgatcaacaatttgaccgttacgtaccttaaccccacctaattcagtaattcgatcgcggtaaggatataagcccgttgtttcaatatcaagcattgtataattggtcaaaaagtcaggcttttcctgtccttttttacgcaacttgtcttgcgcaccggtcacatgtaaaattccattttttatgtaaatactcattcttcacctatttaattatttaatcaaattcatcagcatctcgtgcgaattgctatcaaaacccattgctcgtttcttaagatcagctggcaaatctgcatcagctaaatcagcggcaatataatgccaattaggaaattgctgcactagctttaccattggatcaagtaattgaggactggtctcatctacgcctaattccaaaattacgacattcttgtcctcggctcccgttagaaaccaacgaaaacgcgtattagcatcggtatcagggaagaagttagcattcagcggcatatgcaattccattggactattgcagtcctcgcactttggtactaaatctgccgttacgttgccgttcttaattgccgtcataaagcgttctactacttcatggttatccttttgaccatgattaatcccgctagaacactgcattttagtccaatcaccaaaggcattgaaaattcgattttcattaaagcctgcattttcaaaaaagtgcccgaatgtactggtcgcaataaaatattttttatcacgaattagcttttttagagcaagcatcgtctcactaggctcatattgtaaggaatattcgttgattagctcactccaaaaagcccattgctcgctccaagtatcaaatctcttatctaatgcatccccaattgtatgcacatcatacttatctgcaattttgccaaattgatcatcaaagccttcttcacttaggatatctagtccctcttctttggccatgccattaccagccgttacgatcaccgtgttagcatttttcagccatttttttgctgtcactaaatctgccattttatctctttccctttgaataacctgtcaagcgtaattgtccattaatgtattctcctaagaaaacatcactgatactattataacctgcctcttcaacttgttgctgtaaccaagcttcgcttttgtgaatcaactctaagacatcaatattagcctgaccatcactaattattgggaaacgaatgttagcttcatcattttcaataatagttaattgcccgttttgctcaaagatacaattcttaatcttttcaacagagtagatacctcgactgcgcaatttaaacattaattcattagcggagattcctgctttcatacagttgccaactaacaccttgccatttttaattacttgaacaggtttaccatcgataatccctctaatccaattattgtgatcacggctgaatttcaaaataaaaacaaccaacgtccaaacaattagaactaggaaaaactgaagaattgtaatactaggattgtaaatcaagccaccaataattccacctaaaacataattctgcaactgatctaatgcagtcgtaggagccagattagacttaccaaagacattgatttgaatgattaaagttaagataccgagagcaaacttaatgaataattgtgtgtaatctagctgcattattttattacctctactttatgatcaattacatgggcttgcgttaatgtgtaagtattgcgatcatcattaaggtttaactgataatcaatatttttagaatcaatccttacgatcatgccattagttaaaaccgttgaactaactaaaacatcagaagtcgaaacattttcatctttagcaatcgatttgatgaatggcacgatttgaatcgcctgtgatttttgcgtattaagttgcacatatttttcatattgcgtaccggcaaacaaaagcaaaaataataaggcaataatacccaaatcgcgatacttggttgcaaaacggttatgtaaatatagcaaagcaaaaattatcattgctaacgccgagactgtcaagaagtttgtgtaaataatctctctcgttgattgacttttttatttatcttttaatcaaaataggattctagggtgtctcgaacttgcccaaatcctttatgaatcctgttaaagtaacggtcattgtaatccattgcctgaactccaataaaggtgtcaagcgactgctcagttggaaattctgttttaggcttggttttccgcttaagcctgttgttaaaggattcaatcatgttagttgagtaaattgaagctctaatagctggcggatagttgtaaaaggttaacagatcaggctcaacctgtctaagatctctaactacgtttttgtaggctttttcccagttttgatagaattcatgcagcacctgtacagccatttctttgtttgactgagtatgaatctgcttgaattcatccagtgctttttttcgatcgtcaacccgcattttggcactgatattacgcatgacgtgtaccaagcagcgttgaaaatgcgctttaggataggactggcagatagcctctttcatgccaactactccgtcagacaagaagagctctacctgttcaaggccgcgactcttgaagcctttgagcatttcgctccaaatctcaatattttcagtaggcgcaatacagtagtcaatcacttctttatgaccattaggtttgataccgatggcgatataaactgcttcgcgctcataagtgacccgcttaagaggaatataggtggcatcgagataaacgcagaagaacttatctgacagatgtcgctgatgatatgcctcaactttgggaatcatttctttagaaatattggaaaccatagctggagaataatagccgccatacattttctcaatcaaatcagcgatttctcgggttgtgacgcccttggaatagagcttgataacagtttgctctaaaacatcagtatgccttttataatctggcatagtgtgttgatgaaactcaacgtttctgtctctaggaactttgatttctatttgtccgaattgcgtatcaaccttgcggtaataagcaccatttctagagttgccagtattccagccatttctggcatagggatcatagcccagaaaggcagtcaattcagcttctagcaagttattaacagcctgttgtagttctttgcgcaataaatcatttattttgtctggattgaatagagcttgagcaaaatctttggtaaaatcattcatgaaggagttcttctttctgtatgtgtttttttgttcaaaccaatcatacgagaaaggaactcctttttctaatgtttaaagaaataaatttaaggaatcattcatccttacacaaactattttacagtctcctaacgccgccaccaacatcaaagcatataatactgcctgattagtattctggttattttgaatatatttcattgtataaaaggtcatgctctacctcacccttcatatttttctttcattctaacacagaaaaaaagtagcactttcgtactacttttactagaaattattcacttttcactattattaattatttttgaatttcttttaatccagctttgcgacggcccatgttaaaccatggtgaaacagtgaaggctaacacatcattaattacatagatcaatgaattaattgccatggctaagtttgcatcaccttgagcataagttacgcccaaaagaatcaactggaagacgccactagcagtccaccaaaagtattgattgttgtaacgcataaagcacatgatcccagcagttaatgaaatagcaaaactaatagcatcaatccaaggacgaggatcattggtaaatttaccaatcaaaaagccggatacaacataaacaagtaaagtaccaacaatagcaacaagccattcctttgaaccgaattttcttaagtgattcttagtgtcatcattccatgatctaacagcaataataactggtaaatctaaagttgcaatataagcaatctgttcaaaaatggaaagataattcttagctgaccaacctgcatagataaaacaagcagctgaaatcaaccccaaccaaccattaattgctttagtagcgttaattgccaatacacaaagtgtacccaaaagcgtaccaataaaagtaatcaaagttacgcttgtaattttgccttgaatcagcaaagctaattgaaatccaaacgcaaaaaaccataaacagtaattttgaactggccagcctttcaattgattaaatagccaaacaaaataattttcgtgttttctttccattgtactgagacgtaaaaagtagacaattaaaatattggattaatagaggcttgacttcgatactctttcggggttaagccttttaatctgctctttatcctttcgttgttatagtattcgatatattcctcgattgcttgagttaattcttgaagattatgatacttgtattcttgatcatagaacatttcagttttgagcaggccaaagaagttctccattagcccatcatccatggagttgccctttctggacatgctttgagtaataccatggagttttaaagctcgctgataacgagggctttgatactgacagccctgatcagtatgaaaaatgcagttattaagagctgtttctttggcaaaagccttgtcaagcattgtcattactaaatccatatctggatgtttggagatagtataagaaactatatcgccaccgcagccgtctagaataggcgataagtaaagcttttcattattaagatgaaattcagtgatatcagtataccattttgtgttaggcagggctgcgaagaaatcacgatgaattaaatttggagctattttgccaatagtacctttatagcttgaatatttgcgcttattgcgcctgatgcctttaagacctaatttatgcatccaatagcgaacggttttctccgtaactttccagccctctctgattaactgcaaagctactctgcgatatccatagcggccttgatgatgattaaaaatctcatggattctagcaataagctttgaccgtttaggcttggcgggctgtcgtttgataatcttgtagtatgagcttctggcaattataggtagctcagggtgctctgcaatcgcagctaatacataatttaaactaactttgaattcttgccttagatccgtaatcaccctagctatttcttctgatcttcttggtccaaggcacttagtttttttacgtattcgttcacaatacgcaatcgcaagttttcttctttcagctgctggatctctttctccagttccttgcgagatttctgcttttctttggtcacgggcagggcgtcctttctgtttgataatgacattatacccgtttttcttatattctctaatccaattgttaagcatgccaatacttttaaaccccagttccaaagacagctgtaagtatggtttattgccaaagattgcttgttcaatagttcgctgcttaaactctttggaatagctttggtttttagtagttaaaatttctattccatgcatatcaattaatctaagcatatagtctaaattagctagattcattctgtacgctttagccaattgactgattgagatattttcatctttccatttatgataaatttctattttttgttctttattaaatttagacatagtaaacattctaagctaaatagtgaattagttatccgacgggataattgattcactatttttattcttttgtagaattaaagtagtggtaaaacgatatgccctgaggtctttagacacttgatgtcgcataataaactggcagttttacttaagttttcaatagtctcttcgaagaatgtggacactagatgtcgagtttagaaaattagatctgatttcttaagtaaatacgttttactactaagttttggaggtttttattatgcaagttacttttggaattgatgtaagcaagtctacttctactgtttgtgaactaattggtgaaagcaaaaatgaactaaccattactaataatcgtcctggttttattcaattgcttcatgaattaaccgctttttctaaacatccgcaaattatttttgaagctaccggtgtttattcacgcagactgcaggcttttcttgaagactacggctatgaatatgttgttattaatccgcttaaagccaaaaaagagatgaatatggggctacgctacaacaagaccgataaaactgatgcttatcatttagctttaattcaaagactttatcgccatccggttaatcaaagcgaatcccaaacttataagcagcttaatgctttgagccgcttctatgaccagctgacaagtgacttggtaatagctaaaaatcgacttcaccaagctctacaatcgacttttcctgaaattgaaaatttattttcttctgctaaaggtaaaaattactggcaaatagttgtgcgatatcctcattgtgacttagtaagaagagaagataaaaaacagcttattaactggttaatgagcttaaaggggattgcttttaaacacgctctaaggactgcagataaattaattgaattagcttatcaagcttatccagttgtatcttgctctagcatagaagtcgagcaagtgcagtattatgcacacagattgcttaatttaagtgatcaaagagaaaatttaatcgcaagaatggttaagttagcgaagtctttgcctaatcatgatttagaaaacctagaaagcattccaggctttgcacagaccactgctgtcagagttttagcagagttaggagatttacgcagatttagtaatcctaataaaatcaatgcttttatcggaattgatccaggcagatatcagtcaggagaaatggactctaatttaagtattactaaacatggcaatgcagtcgcacgtaagttgctttatcgagctattggacaaattgataatgcagctaagacaaatccgtgtcatatagcagattattatgaaagcaaaaagctatcctctcaaaccaaagggttcaaaaagatagctattgcttcaattcataaactaatcagaaccatttatgccctgattatcaatgatcaaccatatgattacaacgtagccacacataatcaaaaagactttagtcgtaattaattgatcaagtacattataacgctaagcccaaaaatcagatatggatctgggcttatttgtcgtgtctaactaaaaaaataaatcgacactaaaagatgtttaagttgaaatttaaacaaaaaatgaagccaaacttcttattatgcttgactttacgtagaaaaagacctaaaagtgtctaacttttaggtctcagttcacatcctattcaacattccccttttttattttaggttgcaaaatacaagatcttgtgccttatccgtgctatgtaaaaaaacatcgatatctagtatagtggaccattaattaaatacaagaattgacatttttaatttttgcgttaataacatatttctatttccgtttatcaagcaaacatttattaattttttctaaacagcaaaaaaattttgttccttttagtgacacagtgtcatatgatatatacgtgattattaatttatatttttatggaggtacactcatgtttaaaactaagaaaacgcaatttgctatccgaaaattagcacaaggcgcctcagcagttttactttgcttcggcatattgggcggagcaagtgcacctatcgttccagctgcaactacagatgacccaacaaaaacagtcactgaaagtacaattaatagtgagaatacttctttcaatattgaaaccaccaccaatgcatctgataaattcgcttccatcagcaaaaatggggggtacaacggtagtgccaaattctgctgagccagtttctccggatcagtccattacagaaaatgataatcagcaagaaaaaactactgtagagaattctactgagatatctgagcctgtcaaagacatcaataagtttgataatgatgccaatgttgataaagacgaaacaatcactgtaaaaaagccaacaattaatgtcgacactgaaaaggtagaacaaggcgatgaaacagagaaaagtaaactcgaagaaattaaaaagtatattgaggacgtagccgcaaaacatccattaggcattgccggaattttccacctttttggtaacgaaatagatggatctgctcatattgcaggaaatgtcgcaacagacaaattaagtgctggcaacttcggtactatccaagatgccactagtaacttgactacttgtgatattcattacatcggcagtattgatcatttgaatcagattgatggcgaaaataaactagttatttttggtccagatgttgaatataaatcatacgaaaatggtagttccattcaggtaaaaataaatggaaattggcaaaaagtaggaattccatacaacaaaactatcagagctgaccaaattctagatattcaaggcgaactagataaattaagcgataaatcagacgaatgggctaagcaaacgcaaaccgaaggcgtaattgctgatttcaaggagggtaaatagttggatcgacgtttctaatgctatcaaggatggcagcaaagatcctatttatgtaactattgatgcaaaatacctttcaggcaataacaagcatgaaattgctattaaaggcatccctgcagacgcagaaacaccaatcatcatcctaaatgtaactaatgttcaaaatggcgatttaaccgttagcacaagacttgttttggattattcagaccaaactagcatcaatggcgtaagtgaaaaaccatctcaacttaataagttattatggaattttggaacagatgttaaaaatttaactattgaaggagacttccatttaggtagtattttagctactaacgcacatattaccgctaacaaaaatgttgacggtaatatcattggtaacaaaatcactattaaaggtgaaactcaccgttgggacctaactccgccattagtagaagttgaaactccgccggaggatccaaaagatccacctaaagaccccgaaaagccagagaatccacctaaggatcctgaacctactcctgagcctgaaccggaactaaagcctgagcctactcctgatcctgaagaagagagtactcccccattaccagaagaagtaattcctccaactgataatgaaaattcctctgacttcaaggaagaggacactgctcctctaccagaatctgttgtagaaaaacaagttaaaaagaatcatccatccccttcaactactgaagaaaatattgcacctcatgctgcgactatcccaacctcaactataactgaaaaagaaacagttttacctcaaaccggtgaaagccaagacaagctaatgacgattggactcatcactactagcgttgcttcattgtttgcagtattaggcacagtaatcaaaaaaagaaattaattaaaaatgattcaattcaagccatttttattcttaaaataatctagaattaagtgaggattaaaccatgttaaaaaatagactaaaaatattccaacaaattcttcctactaaggcaactaacactccaaaataccaattgcctatcaactattacgatcctgaaggcagcatggttggcacttattctggaattaacttggcggcaaatgaaactatcactcaccaccagctcaaaagatttatcaacatccatcttcccgaaaactacgaagtttttccttactttgcttatcctaaggagaatatcacctgtgaaaatctgcctgatgaaataatgatcacaatcagattatctaattaaaaaaggcgactcgattgagtcgcttttttcattgcaattgatattaatgttgcgaagcaccagttgtagtatctggttcttcgtgcttttcttctttaacttctgcagccttagttgaagcaccagttgcggcgtctggatcagaatttctacggtaagttgcaccagtagttgcatcatcatctactaccaatttttgaccagtagtctcacagaagtacttaactaatggatataagtctttgacccattcataaataccagcatagttaccttggtcgtcttctacacgcttataatagtccacaaccaacttcttcaaattgcctgttggtattggcatataaacatcatcatgacctgcttccttagtccgcaaagcatgaacaacttttttaacattcggaataacgtcacgaacatctgggtgaactgcgcgcatcgtatcacccacttgatctggcgtagctagcattttcttgttaggatcagttggacggttataccacaagaattggttattatcatcaacaaatgtcattttaccaatggtatttctcagcatccaattaagttggttaacagttaacagacctgcatcaagtttgacataatcgtcaccctccgcagcatgaacttttttagctgctttatctagccaatcaggatcatttttatcgattccctcaactgtatacttagacttaccctttgcatcgaaatcttcttttaagtattcatcggcattcatatctttaagccattttggttcagccatagtaagaccccctcgtatgaactttgttaatctaattatataatgtaagtggtttcaattcaacaattttaatatatttatataatatttttactagctggattatatattattttacgcgtggtgctagttaaatctttctagacaataagccaaattataagctaaaattgcaatttccaaccggctttgaaagcctatcagactacgtgctcgattgttctcggcattgtaataggtcagaagcgaaaagtcgctttcaattgttctgcgaatagccatcaattgatgatcattgtgctttttagctcctgtcatatttttacgatatggtgtccaaagttcataacccatttgttttagctgttgatgcagttctttgcctaaatagccttcgtcgccaagaagatagtaattagatggatgggtattttccagcagttcaactgtctccctggcatcatgaactgatgcttttgttacgacataatcaagaatgtaaccgtcatcgctaacaatgacatgaactttgaaaccatagaagtaaattttcttggtggccttataaccaatgttggcataaccgcgaaaaattttagcacgatagttgcgaattggttggcaaacaggtaccggaaagctgtcaatgatcaagaaatgtccattcaggtcaacctttttattcatttcttgccgtatctgataaatcaattgcaatagctgacgtgaacgccgattaaaacgtgagtgtgataaacaattgaaacattcacagaatcttctttgtgattcaattcctgtcttagcttgccagataagtaaagccaaaatcagactgtccgtagttttaatttgatcaatatttcgccgatgagtaaactcagccggtgcatacaaacgataccagtgccgacaaattatcactaaatctttaaaactaacttgtaaatggtggctaaaacgcttaagcttaaggcagttcaatcagatcagactcttttctattattactatttacaagtcgagtctaacaagattggacttttttattaactaaaacgatttaactagcaccctgcgtattattttatataaaaaaagctgatcaacgagcaactctttacatctttgtctcaattgtatgagtgtccaaatgaatgatcacgtcaaacatcgctttttcttctggtgaaatcttatgagccacctcaataacagcaatacgtggattcttcaacagcgtcttatgaatgcctaacgacaagttcgggtcaagcgcacttgtcgcttcatcagccagcaaaatcggccgatctgataaaagcgcgcgagcaatttctactctttgaatttgtccacccgacaagccactgccgttttcacctacagccttgtctagaccctgttcctttaccaattcatctagaccagcctcatgaataacttctttcaaatgctcgtcactcactttacgtcctaacgtaatgttgaaacgcaacgtatcatcaaacatgaatggcttttggttaacataggaaaaataattatgggcagcatcccaatttcccgttacatccgtaccattgatcaaaattttaccgtctttgggctttctcaaacctaatagcaagcgaagcaaggtggtcttgccccaaccacttggcgccatcaatagaactttttcacccggcttaactgttaagttcacattctcaaagatgcgtttgtgatcactacctgtaacataagataattgttcaacctccataccatcaaaatgatcgatcttctgcttatcatctttcagcacgtgatgcaaagcgcgctgggtcttttcccacattggcacagtcgacttgacttggttaaattcgttaaaaagagtcacgattggcgtgataaagttcaaggccaaatcgaccatcattactaatgtacccacctttaaatttccctgcagcatcataataccgccaatagtacatggtacgatgaagcaaaacaattcagcagctgaataaattaattctagtgcccaagcttgagtcaacgtcatattacgcagagcgttctccattgcctgggccgcaccagctgctcgtgtaacgatgttggtgcgcacgttataaagcttggtagcctgtgccccatttaatgaatcggacacattttgcgtatagttagcgttagtcgttgcccaaatcttggacttacgtgtaatgataggactagtaatcatttgaactaatgctggcgcaagcgtagcaatcaaaaatactagggtcatctgccatgaactataaaaagcaaaagtaattgccccgaaaaacgacaaaccttggaaaatcatatccaattgtgccgttatccgattagtttcaatctgttttaaatcgttggtcatcagtgataaaccgctcttgatatcaggctcaccttgatcaaccaaataacgcaagttagtgcgcttaaaggtcatattcacgtcacgaataatgcccatctttaccgtttcatagacaaagttactggccataaaacacatctgacctaaggcagtcaaagcagccaggcgaatcaaatgcagataatcatgcgatcctgacgaagcaacattcaacataatttgtaccatataagctacaaagacgatgttgcaggccttgattgcggccaaaatggtatagctaataatttggctttttttagcgtacttcaggctcattaatttctccttttctatcccgttagaaacattatacccgctagcttgtctttttctcaattagatacgataattagagtaatcattttaatttttaatgaaaagcagaaaggaacttttaatgaagactggtactaaaattattactttagacaacggttatcacttatggaccaacacccaaggtgaaggcgacattcatcttctagctttgcatggtggtcctggcggcaatcacgaatattgggaagacactgcagaacaattgaaaaagcaaggcttgaacgtgcaagttactatgtacgatcaactcggttcactttattcagatcagcctgactactctgatcctgaaattgccaagaaatatttaacctacgaatatttcttagatgaggttgacgaagtccgtgaaaagttaggacttgataacatttatttaatcggccaaagctggggtggcctattagttcaagaatacgccgttaaatatggtcaacacttgaaaggtgcaattatctcctcaatggttgatgaaatcgatgagtacgttgcttcagttaacagaagacgccaagaggttttaccacaaaccgaaatcgacttcatgcacgaatgcgaaaagaacaacgactatgataatcaacgctatcaagatgacgtacaaattttaaacattaatttcgttgaccgaaagcaaccatctaagctttaccacttaaaagacattggtggaaccgctgtttacaatgctttccaaggcgacaatgaattcgtaattactggtaaattaaaagactggcatttcagagatcaattacacaagatcaaggtgccaaccctattaacctttggtgaaaacgaaactatgccaatttcaactgctaagattatgcaaaagaagatccctaactcacgcttagtaactacacctgacggtggtcaccaccacatggttgacaaccctgacgtatattataagcacttagctgactttattcgtgaagtagaaaatggtacatttaagggcgaaaattaattaacagatattcaggctggaatcgatttccggccttttatttttaaggaaaatgatatggatgaaaaagatgtcaaaattctgctagttgaggatgaagaaagcgtcgctagcttcgtcaaaactgaattagaatttgaggattaccaagttgtttgggctgaagacggcaaaaaagcattagacctttttactcaagaaaagccaactttaattttgcttgattggatgttgccagtatatgatggcatgaccgtgttacggcgaatccgcaagcaaagtgatgtccctattattatgcttaccgccaaaaattctgcctctgatataagctctgctcttgatcagggactagacgactacctcaccaaaccatttgaaatcgaggaattgctggcacgaattcgggtagtcttgcgaagactggaaaaaatgcggcagcaaaatgacgtccctgatacttccctagaatttggcccattaaaaattgatctgcttaagcacgaattttactgtgacaccgagcaaatttatcttactcctaaggaatttgccttaatcactgaactaatgcgggaccccgaaaaagtcaaaagtcgtgacgagttgcttgatacagtctggggatatgactttgttggtcaaaccaatactgttgatgtttatattcgaactattcgcaacaagataggcaatccctacaaaaagatcattaaaaccatgcgcggcttgggctattgtttgagaaaattagatgataatcatgaaaaaagctgatcctcaaacaactacgcaacaattaacccgtttattcgttaggctatttgtcgctattttaattctggtcaatttggcttttctaattatttcatcggcctatatttattaccaagctgaacggcaaagtgaacaagttgttgaagcagtaaaagaaaatcttgattcaaaatatgactggtcggctatgctggatgcttatttggcaaaacaagacgatgatgccatcattttaaccacccctcaaggcaaaagttattactctgaaaatgctcacgagacctttaaacaaattaatcgccaaaatcattatcaaaacatggtctattccaataagcatatttacttcttacggacggaaaactcgcatgactttaaaatcaaggttgcattaaacattgatcgcttatttcatttaattatttggctatttgggacaatgattgtcatcaacttaatcgctattctgctgagcatcccccttattcgccgttttgcccacaaatggagtcgtccaattcaggtaatgaataatgaaattcaagaaatccagcaaggtgcttcaactgagcaaatcacagtgccgcaacaaccattagagattcgaaaattagcccagtcttttaacaatctgctagcttttcaaaaacaggccttacagcgtgagcaacaattcgtcagtgatgcttcacatgaactcaaaacaccaatcgccgcaattcgaggacacgttaatttaatcagacgccatggtcaagccaaaccagaaatcatccctaagtcactggattatatcgatactgaatcaaaaaagatggaaatattagtcaacgatttactcaccttaggaagaatcgaacgcaatactgaagtcgtcaaaattgatttggtaagaattattaatgaagtagtgtcagaaatacagtcagtttatccacaaaaaatacagactgacatgccacaagtattgaaatatcgtattaattcactagattttcacaacattgtgcacaacttagtggaaaatgcggcaaaatattctcctcaagacagcactattgtagttaaattagctaaaaataaaggacaggtctctttcacagttgcagacaacggaatgggcattgcgccagaaaatcgcgagaagatctttcaacgttttttccgtgaagacacgtcccactccaataaagttaaaggatctggcctagggttagcaattgtcaaagctgaagctgataagtatcatggtcaaattaaagttacggataatagtcctcagggaacaatttttacagtttcttttcctacagaaaaatgaagaaatcttcatttaaactctattaaatcttagttttttaaagctgcttagctagtaagataaatatatcaagttaaagcaaaacaaaaaattatcaatagtttaaaggagaacatattatgaagactattaacttaaagaaaattactattactggcgtagcattactcggcttaggaactgctgcaattaccgcaactaatttagctactgaacctaacgtagttcaagctgcttcaagcaaaattaaggtttcacaaaattcagctgttaaaaagtttaaggcaaaattcaaggcagctaaagtcgaatcaatcagcttagataaagaaaaaggccgttacgtttacgagatcgaaggcttcaattcaacgagagaatacgaaatgaaaattaatgccgcaactggcaaagttatctcatcccactccgaaagacttgatcgagacgagcgtaataaaaaagcattaaatctcagcaaaactatttctcgctcaactgctactaaaattgctcaaaaaagagtatctggcaaggcagttgaatggtcattagatcgtgaaggttcaaagaatgtttgggaagttaccatcagcaagaacggccaaaagagcgaagtaaaaattaacgcaattactaaaaaagtaatcagtgttgaacgggactaattgagaaaagaaggtatagaatagatgaaatttactaaactgacaagtattgcattattaagcgcagctttattaacaggaactgtagcatgttcaaaacaagataattcaactgctaaaactactacccaaaagagtgttacttcatcaaaggttacacataattctgaatcagcaatgagcaaacaaactcaaaaagataatattcaaatcaaattaagccagcaagaagccattgataaattccatcaacaatttagtggcaaacagcttaaaagcattgaattaaatcgtgaaggcaaacattacctttatgaaattgaaggattcgattcaaacaatgaatattctgttaacatcaacgcagaaactggtcaaattggacatgttcattcagaaaagttagatcatgatgatcgaaaccaaaaagctctagatttcaagggcaccattagccgcgacgatgctagtcgtatcgcagaagagcacattaaaggcactagcgaagaatggaaactagagcaagacgaagacactggtaaaacatactgggaagttaaggttaaaaatggtcatcaagaaaccgaagttaaaattaacgctcacaccaaagaagttatttcaactgaacatgatgattaataagattaagaacataaagaaagccgcaacattattctcgaagttgcggctttttattttgtctaatttttggataacttttttaccaataaccaatcagtttgaggatcgctaccaacttggaaagtatgctggctcactttttcaaatccatgacgcttataaaaatattgtgccggaatgttcttttcataaacgcctaaccacatgtaatctttgccttcttctcgtgctgtcttttctgcaaaatcaaacaaaacattgcccaacccgcgatgttgaaaattagtacgcagataaattcgttccacttctagagcattatcacgtaactgctcagtctgagcatccccaacattgatttttaaataaccagcaatttttcctttaaccattaaaaagtaaaaacgactattaggattttcaatctctctaatcaacttttccgtctgataatcttcctctaaaaagcgtttcatgtcatctggtgcagtataaggatcaaaagtcgttttaaaagtttcacgtgaaactttctgtaattctttcacatccgctgttgtaattgctttaatctcgtacttcatcaatatttcctctttccaccgttcttaaccaggtgccaattttcactggcattcttttctacaatttgtaacaaagcagctaattctgttctctgtttttgatctagtcctgtcaaaactatttcatttgaataagcattttctttttctattcgagcagctaatttatctcctaattctgtcacaaacaaatgcttaatctttttattctgctggtcattttctttcctaatcagctgattttgttccagttttttaatgctacgagctgccgtcgtccgatcaacattaagcatccctgctagatggtcagaaataattcccggattttctttaatgcgggctaaatacaggtactgacctcgattcaattgcatctctttaaattcaatattagcaatcgaatcaagtgctcgcgcaatagtgccaatttgacgcaaaatatcttctttcatgtttttcacctaaaaactattatatttaattttgttgtaattgcaacaataaaatataaaaactaaaaaagggatcgctccctttagttaattcatcaatttttctttagttcatttagatcgactacctgatcagctaactgcttaacttcatctcttaagtggtgagttaccataattacggttttatctttttgcgtcaaaatcaatctttctaattgtacgctagaagctttgtctaaggcagaagtagcttcatctaacagataaattggtgtatcacgcagcaatgcacgtgcaaaagcaacacgctgtttttgcccaccggacaactgtttaccttggtcagctaaaacagtatccatgccatcaggcaacttagcaattagatcctctaatccacattctttgatcacttcagaaatttttgcttttgaaacttggcgtcccaaagttaaattccaccctagagaagcagtaaaaatatatggatcttgctgcaaatatgtaatctgatcatgcaaatccttatctgaaatctggttatattccacatcagaaatttcaattttcccctgataatctctaagtaagccagaaatcaaattcagcagagtcccccatcagaatatatttatttttcagtttaaaatttaaattcaaattctcaaagataggcttatcttgtccagaatactgataagaaactttatccaattctagattgcttagtttaaaatcagcaggcaaagctccatcaacagttttaagcggtatagtcttaaatttttctataattggtttaactgatttgaattcttgccaattaaaactaatcccacttaattcagcgaaaattgtactggcaaaaaattgtgccccactgatggtcccgactggcgttaattgatgcaaaatcaaccagcctgtttgccctaaaatgataacttgactgataaaggctagaccattggtaatcgcctgagttatcccggctgttttactataatttagcgcatgttttttaacatcatcagaagcgccattgatctttttgacgattgtttgcggtaaattggcaagaaataaggtattgaagccattcaacacatcattaattgaattaaccaaacgttcattggcatgggtatattctaatgaccttttggccaaaattttagaaaacaaattgggaaccactcccataataattgtcaaaataatcacagtgaccacaagactgacattgaagtacgccaaagtgagcataccgaaaacaatttcactgatttgtctaatgatcatcatgaaatcctcgacaccaaagttattaatggttgtaatgtcattggtcagccaagaattgtaagtagctaccgtttgttgatgaaagcctgaataactcgtctgtgatagatcttgcgcaatgtcatttctaattaatttatccacattttgtgccaaacgggtttgctcaacattgactagacagttaacaatcgcgtaaaaaatataggcaccgcccattaaggcaacccacatgaaaaaacgctcagcttttaattttgcaactgcacttaaagcattagcgctagatattccggctagtgtcaaaaagcctgcattaatgactattaaaaatgtaacaaataaaaattcccactttaatcttttaaaatattgcagtaattccattgattctccttatgagactgtaaaatagtttgtgtaaggatgaatgattccttaaatttatttctttaaacattagaaaaaggagttcctttctcgtatgattggtttgaacaaaaaaacacatacagaaagaagaactccttcatgaatgattttaccaaagattttgctcaagctctattcaatccagacaaaataaatgatttattgcgcaaagagctacaacaggctgttaataacttgttagaagctgaattgactgcctttctgggctatgatccctatgccagaaatggctggaatactggcaactctagaaatggtgcttatttccgcaaagttgatacgcaatttggcccaattgaagtgcaagtgcctcgggatcgcaacggtcaatttcatcagcacacgctgcctggctacaagcagcactcggatatcttggaaagcatgattatcaagctttactccaagggcgtgaccaccagggaaatagccgatctaattgaaaagatgtatggcagccattacagtccagctcaggtatcaaatatttccaagcagatgattccaaaggttgaggcttaccacaaacgcaagctaagcgacaagtttttctgcgtctatttggatgcgacataccttcctttgcgccgagaaacatttgagcgtgaagcagtctatattgccattggcatcaagcctaatgggcacaaggaggtcattgactactgcattgcgcctagcgagaacattgaagtctggacagagatgcttcaaaacatgaaatcccgaggcttaaagcaagttgagctttttctttctgatggtgttgttggcatgaaaacagccttggccaggacttatcctaaagctcattttcaacgctgtttggttcatgtcatgcgcaatatctgcgctaaagtacgcgtcgacgatcgtgaaaagatcatgaacgaattcaaacaggtgcatcaacagacaaacaaagaagaagccacagctgtcctgcatgacttctataccaaatggggcaaggtttacagccatgttatcagaagcttgaaagacatagaaccagatctgctggtcttttataactatcccaagcagatcagagcttcaatttattcgactaacatgattgaatcatttaacaatgtgatcaagcgcaaagctaagcctaaggcagagtttccaactgaacagtcgcttgatgcttttattggcattcaggcaatgagctacaatgaccgttatttcaatcgaattcataaaggctttggtcaggttcaggacaccttagaatcctactttgattaaataaataattaaaaaatcaatttacgagaaagatctatttacacaaaagatttgacagtttcctccttatattaaaaataattaaattaataatactatatttatgtatttgttcaatattttttaatactttacttaaattactgcaaaattaaaagggatcgctcccttttaattagtctacataagcatatttatatgaccattgcgtaccagcagtattatgaatgatgccgtgaactcgcttgttttgcaagtaagctgtggtctgttgataaatcggtgtaatagcctgattactatttacaatcttagctgccgaaatcagatcattccagcgtatgtcaggattattggcgtcttgattgccagcttttttaaccaaattatcgtactcagaatttgaccacttaccgtaattgtaagacgtacctgtcattggaatttgcataaatgtcatcgggtcgttgaagtcgccaccccaatgagagagataaatgtcaaagttgccttgatgtgctcgactggtggttgacttatcaggaatattggtaatatttatcttgattcccttcaattcttgggtccattgtgactgcaaatattgggtcaattgatcactgtctgcttcatcatttgaagataaaacatcaaaagtcaaactcttttggccaatctcctgtaatcccttttgccaatatttcttggctagagctggattataatcaactgtatttttcactgcttgttctttagcaaaatctatacctgttttaggatttgcagccaaatcattggcaacaaagccttttggcagagttgagccattgcctaaaacctttttagtcacaatatcacgatcaattgataatgataaagccaagcgaatatttttattattcaaggcctttctattaactgcatttttatccttaaaattataaagcaagaaacgcactaacgaatatggatattgagtaaagtcattattgctcttcaagtttttaacttgctcacttgaaagtggagttaaatccaatttgccctgttgatacaactgataaccagtattgttagacttaactacttgatagtgaatcttgttcaacttgactaccttcttgtcccagtaatcattattcttaacaaatgaccaggtatcattagttccattccatcctttaatcttgaaaggacctgagtagacttggtactgagccttggttgcgtatctattgccatactttttcacaactttttcgttttgcggcccaaatagtggataagccatcaatactctaaagtaagcgatcgggcgatttaacttaaccactaccgtctttttatccggtgcagaaattcctaatgcattaggtgatttctttcctgcaatgattgcgtcagcattcttcacgccactaaaaagataggcatacggagaagcggtcttaggattcaagcttcttttccaagaataaacaaagtcctgcgctacaatcggatcaccattggaccacttagaatcacgtatcttaaacgtccaggtcttaccatctttagatacggtcccagttttagctaagccggctgttggcttaccatttttaccaagacgataaaaactttcgaatacattgccagtttgaccaaatccggtagacttactgatatcaatagtatctagtggagctgtggtgcttaaatttaaagtgccactttgagctgccgacttactactgctattgccattaccacatgctgcaagaagcattcctaatgaaatagtaacgactcctgctaaaactccctttagtttcgacataaattttcctttctcaaacaaaaaaatgggatgtactccaacacggaatacatcccattaagaaccacaactttttaactagttaatcagtaatagtcttaagatgaatcaccacatcagagcatgtcaaataaatgctgtttgtacaacaacattcagtgtattgacattgcatttgacgcttaaacatgtgattcatcatccttcttacttttgataagaataatcataatttattcgatcacgattgtcaacaaaaatctattgtataattatagaaaaatatttggagaaatttttatggaaattataaaatatggtccttacactcttttcacacttattagaacaatcctaacatttatcgtggctattgagcatatcggtatctgtttcttagaaatgtttggtaaacctgaacaacaagctaaggcttttgacatggatatcaattttgttaaacaagaagctgctcaagtttcactagctaaccaaggcatctacaatggtatgttaggtgtaattttgatcattgctttctttattttccctatccctattctttttaacgtatggaaattaattctaagtttaattgtcgtagtagcaatttacggcggattcactgcaactaagaaaatctttttagtacaaatgctacccgcacttttagcattaatttttcttttcatttaaaaatattgcatttttgtagcaaaaaacataagaaaattcaaagctcctagtgataagctgtcaccttgtgattatgtaatatataatatcagtaaacatatagaacataataacgaggtggaattcatgagaaaattttttatcattatcagcagcattattactgggttacttattgggataattggggcaacgatctatctaaatagtcaatcgtcaaaggtaagtaactttaccattcgaactactaatttaacagctcaaccgaaaatgatcagctattctagcaataacctgccacagattaatctctcacaggattccgccgttcagaaattcaaatcattatatacacatgcagtaggtcaactaccttagactgaagtctagggtttagtggcttgttagcttgcgctaaccagaacaccaacttgcttagatacggatttgacttaccagcagtaatcttttgactattgccgatagaggtcgtctaattaccaaagccttttaagtccgcgagttgctagcggactgcagcttttctaggctgcttcttttattttaggattctgccacttgcctaatcctttttctaagatgttcacggccgcattccaatcacgaatatgatgcatctgacagattgggcaagtccattcccgatccttaagggttaatttcttataaccgttttggcccataatactgccacattgatggcatctttgggtggtgtacttaggatcaattgttagaaattctttgccatatagatatgccttataagccagcatgttcaggaaactacgccaaccaacatcagaaatagcttgagacaaggcatgattcttaagcaggtttttgctccttaattcctcggcaactactaaatcgtggtttttgattaatgcagttgagagaacttgtaagaagtcttcacgctgtctgcgaatcttgtcgtgcagtctggcaactgataagcgctgcttttgatagttttttgctagccgcaaattgcgtccttcttttttagcccggcgctgcctgcgagataatactcgttgagcacgagccagcttctttttggctttgcggtaaaagcgtggattagcgaccattgatccatttgaatccgttaagaaattatcaaggttgagatctattccaagttgactctgcgtcttaggcaaggctttaacaaaggcaatatcgctgcctaactgcattgataagtagaattgctcgtcagcggtcttttttatcgtcactgtcccaattctagttgagatatgattaagcaagcgctctttaatcagttttctaaaaccagcaatgcggacaacgcctagcttaggcaatttaatatgcttagcatcaataaacctagctgtcccgttatcaagaaaagcttctggctgcttaggatattgacagttggtctgatatgaccagtcgctgcgttttttatggaaagttgggattccatgaccaatcttacgatagttgttccaagccttctgataattttgaatggcattggcaagagcgaggctatcaatttctttaacacgcaaaaagctataagtatcgcggatattctttggcttagccaatagttcgctattagtgactacttcttctgccaacctagtctcataattattaagaatagaaaaggcaaaaggcattgcttgatattgtctaacagctaagtagcccttagcatgataattacttcgattacgtcctacataagagttgtagacaaagcgctgcgcatcatagtttagcttaatgattttcttttgcttagaactaggataaaagcgaagcttaacgccaaaatgataggctaaactgctcatttttttcatgtgtttcacctcctcgtattatataaattgtaattagtcatattgtgataattaatcaaattagtatttgctttttgatcttcacatgttagcctctaattgtcattggctttggtcaactggtctaggttatcacctcctgcagttttgtctgctttataagtctgccacccagacagttcctttatgctctaactcacatgctgtattgattgcttctttttgctagtccttgagcaattgggattaggtgcagctttcaaagaagcaaccagtgaatacttatactggcgagattgaacttaagaactgtaattaggggttaacatgtgaagatcaaaatctatgatcagaaatttgaaagaaaggaggccatttccaatgaaattatttgtcggtattgatgttagttctaaagatttacaggtcgttgcacttgattcagaagatcaaaacaaacgcttaattaacgatagctttgtcaatgatctttatggtgctagtgaactgaaaaaacaaattttagatctagctcaaaataaacactatgatcaaatcattattggcatggaagctacatctatttacagttttcatcctgcttactttttccaaaatgacgaagatttacaaaagctcaatgtagagactgatgtaattaaccccaaagaaaccagcaggtttcataaagtctttgaagaaagtaaaactgatcctctcgatgcttattacattgctttgtatctaagctttggacattatcgagtaagcattgccagacaagacaactatcttgctttagagcgtttaacgcgtaccagatatgaattagttcaagaactgactcgtaccaaacagcacttcattgaagctttatattatcgggttaataaactaatcactgtcgataaagataagattaatactcctcttttcggtgctacaatgatgtctattgtaaccgatagtaaaactctggatgagatcgcggatatgcctaccgaagacttaatttcttacttacaggttaaaggcagaggacgcttttccgatccagataccttggctaaagcaattaagaaagctgttagaggttcatatcgcttaggcaaagtaatgactgattcaattgatgcagtgctttctgttcattacaacatgattcaaagctttaatgaatctattaaagatctagaaaaagcaattgatcgtatcgttgatgcattaccagaaagcaaaattctggaatcaattcccggtattggcaaaacctatacagctggtattatcgctgagatcggaagtatcgatcgctttgataaagaagaacagctggctaagtatgccggcctaacctggaatcaatatcaatcgggagatcacagcaacgaacatactccaatggccaggactggaaacagatatctaagatattacttgattgaagctgccaatctagcaagattacatgatcctgttttcaaaaaatattaccaaaagaagtatgatgaagctgtctactcgccgcataaacgtgcttgcacattaactgcaagaaaattagtacgagttatctttaaattgctcaaagatgacaaactgtacaggacaccgaggtcttaatttcaaaaattagtctaaatttaaaagtaaacaaaagtttaacattaaaaaaatcaacctttaccaaggcttagtttcatatactcaaatttatgatcaaaaagaacaaatatcatcgcctttcatttgacttattaccacatgactcatagattagatatttatattttacagggaagtcgaacatatgtctctattttttaataaaaaagctgactgctaggtcagcttggtcctatccatccccacattaaaatacggggattttcgggcgtttttcattaaatcgatcacacttagtttaagtaaagatatctatgtttatgacatagtaggctatgatgaccgtaaagactgtactattcaagttgacgcaactaataacaagattctaggtcagtctacgcaggtgcttgattatgactacgaaaaagatgcgtctttgaacctaaaaaagacaatttcacgccaagaagctaatgaaattgccctaaaagaattcagtggaggaacaccgatttcatgggaattaactgatgacaataatcaatcaatttgggaagttaaaatgatccacggtaaacacaaacataccgtaaaaattaatgctagaacaaaggctgtaatctaaaataatccccaacttatgcacaagttgaggattattttcttatcttttatctaggttgactatctgcacgtgacttgtaatcaccgttttcagtaccaataattagcttttcgccattcttgataaaatcaggaacttgcacaactaagccagtttccatagtagcaggtttaccaccaccagctacagttgcacccttaatctctggttgtgtttccttaacggtcatttcaacagttgatggcaattcaataccgataatcttgttatcatctgtaaagtccatatcaaccataatgttaggcatcaagaacttaacgtcatcacccaattgatcagctgaaacttcatattgatcataagtatcagtatccatgaaagtataagtattaccttcgccgtaaaggtattgagcctttttcttagttacttcaactaaatccactttttcagttggacgcatggtcttgtggacaactgcaccactcttaacgtcacgcaaatccatttgcataacggtattacccttacctggcttatggtggttagcctttaaaactttgatcaatttgccatcttggctaaaaatcataccttttttcaaattaattgcttgtaccattatttcttctccctttaatttaaacttacctttcgactagtttaaacacgctggaggcaaagcaaatttttttatcaacagtaaataaatcgtattcataatacctagtataccaaattagatgtgccgcaggtatatccgatcaatcaaatgtccgtcagtcttatgcaaaatcaggctagcacgttccttggttggcgcaatatattcacgcaagttgaccagattaaccatctgccaggtttcttcagccaattgaattgcatcttccagcggtccattagccattttatagtaaaaattatctggcttatttttatttaatttaagtacttttctaaagcgttgcatgtaccatttttcaatcaaatcttcttcagcgtcaatataaattgaaaaatcgaaaaagtcactagtcacaacttgtccactctcgggcaattgcaatgtattaattccttcaataatcaatacatcaggattttttacatgaccatatttcccaggtactatatcgcttaattcttgagaatatagtggataaacgatatccttctttccacttaaaacgtctcgtaaaaaatcactgagcaaagtcatattgtaactttcaggaaagcctttgcgaggcattaaattacgccgctttaattcctcattagggtaaataaaaccatccgtggtcatcaagtgtacctttaattctggataggttctactgagcaacaattgtaataaacgcgcagtggttgatttgccaaccgcaaccgaacccgaaataccgatgataaacggagctggtgaaaaacttttatgcaaaaatttgatttgtgctttttgcgcattctttttttgttggtaaactaagtgtaagtaactgatcaaactggtatagatctcatgcacgtcggttaggtcaatcacgtctcctaaagacttgatatcagctaattcttctttggtaatattgactttatctaagggagctaatttagcccattcatttctgttaaaactcgtataatttctcatatatcgtatccatattccttctaaaacactaacttattataatagaaagcgctaaaaatatgaaaaaaataatcctattcggcgattccatttttaacggatatcgtaatggtcaaaatacaaacctagtaactaatttatttcaacaggcactaattaattatgcacaggtggaaaacatttctaaaagcggtgctaccacagttgaaggcgtcgattatttggagcaaatttccccagaacatgatctagttgttgttgaatacggcaataacgatgccgcaacagcttggggcattagtccagaaagctacgaaaagaacttggctcaaatccttagtgcagtaggcaaagccattgttgtgggattgtgcaatcccaatccagaaagtgacatttttcaatattatggtgctgaaagactcgatctttttaacaatatcgcccaaaaagtcgcaaaggcacatggtgcacaatttgtggatattttacctgcaatgagaaacttaaaagacaaatcgacatattatcaagccgacgggcaacatttaactgatcaaggaaatgagtttttagttaatcaaatcgtgccagtaatcaaaaaagacttagcctaagccaagtccctcttcatcatcacatgttctacgccgccttcatcaaacggttcgcctacaacttgatagcccaagctatcatagaaaggctttacccgcatttgggcgtgacagtaaactgcatcaatcttattttgccgtaaaaatttatgcacagctgtaatcattttcgatcctagctgttgtccgcgcgcttcttttgacacagcaacgcgtcctagcatccatttaccatcttcttgaaacagacgacaagtcgctaaggcagtcgtctgtttttgattgagtaaataaacctgaacagcaattaggtcctcatcatctaaatctggtagagttatcttctgttcagccacaaaagtcgtgttgcgcaatctttctacgcaatagaattctctagctgtcatttcatcaatctttttaaaagtaaaattatctatcttcatattacttgcctaaccaactattgtttctgccaaaccatttttcattaagtttacgcaattgaccatttttttgcaattttgctaaaccttgattgaccttctgacgcaaagttttgtctcccttacgcatccccacagcgaacaagtccattggcacgcgatcattctgaattaccttgtattcgctacttttagccatgtgagcaatataatagtcggcataaacttcatctaacagaattccttgaattcgtcctgcattcagatccaagaacgaattagaaatcgtatcatataaaactgttttcttagcatgcagcacatcttgtttagtttcataccactgctctgctgttgaaccagtttgcattcctaattcataattcttcatttgtttaaatgaactaatgtcactatcttttttcacaactaaaacctggcgattacgtaaatatggcttgctaaaagctacttttttctgtcgttctggcgtaatgctgtaaccattccagagtaagtctatcgtaccgttacgcagctctgtaacgttcattgaccaatcaatcgtttgaaaagaaaccttaatgccatattgtttaaagactgccttagctaagtcgatgtcataacccgtcaattggccgtttttcttttcaaagcccattggtacaaaactatcgtctaagccaattaccacttgctttttgctggcaatcttattccatgtatcttgagtattagcttctttttgtacgctttggcaaccagttaaacataatgttaaggccaagacgatacctaaaatccattttttcattgcctaatcctcgcttaacggtcgaaccttgagcatctgatccgccacattctctgcaaaattcaagtcgtgggtgataatcagctgggttaaacccgatttttttaagcttaaaatcattttctcaacttccttacgtaaatttggatctagcgcgctagttggctcatcataacaaagaatccgcggtttcatagccaaagctctagcgatagctactcgctgtttctgcccacctgataactcataaggatactgctgttcacggccacttatttgtagacgttttaacaatacacgcgcatcctgctctgcttcagttttactcttttttaataccaaagtaggtgccaaagtgatattttgtaaaacgctcaaattaggaaaaagattataatcttggaaaacaacgccaaccttgcctgaatcataaggtttaccgtcaatcaaaatttcaccagaatcttttgtttccaaaccggcaataattcttagtaaggtggttttccccgctcctgatggacctacaattgtcataatttctccgtctttcaaggtaaaagagatgtcacgcaaaattcggtgaccgttaaattctttgctcaaattttttacttctaacatattctcacctcaactacttgtaataagaaaagtatttttccagctttttcaaaacaaaagcacaaatactgatcaacagtagataaattacacctactaaaactaacggtactagcgttacgtctctggccattgccacattgccggccctaagcaaatcacctaaaccaatgacataaactagcgatgaatcctttaccaagttaattacttcatttccaattgaaggcaaaacaatttttattacctggggaataataatcttggtcatcgtttgccagcggctcaagcgcaaaactttcgctgcttcaaactggccttcatcaatcgattggaagccgccacgaaaaatttccgcaaaataagccgcataattcaaaacaaaagcaaacaaggctgcttgatagcggggaaagacgatatgaataattggtaagccataaaagacaaagatcaattgcaataataagggcgtgccccgcataatccaaacataaaagttaaccaaccagcgtaatggtttaaacttacttttttcacctaatgagaccaaaattcctaatggcgttgctaaaattaacgtccagaaaaaaatacttaacgtcatgcctgctcctgacaaaagagcgggtaaaatttctgcaatatattttaatgacatactctcaccttcatttttctttcctaataaaaaagccctcttaggattaacctaagaggacgactgctcgtgattccacctcatgttcgcacctgctcacgcagaaatgcctcactaggttgatcattttaaaagaaaaaccctcatagccaaacggctacgagggcgaatgtaatcgcggttccacctcatgtttacaaattgctcacgcaacttgcctcaataagttcaataatcaacctttagctataacgggctatcccggattttcctacttttgttcagaagaccaactcacagatgtgattcatactagcaaatatcttatttccaccagcaaagactctctattactttgactagtattactatttctgttctaagttgtttttaatgttgaataaatcttaaatgatctagcaacttttgtcaattatttttcttcataagtatctggatcaacatcaagcaatggactcttttctccagtataaataatatctagcttatacattgcacgagaggtaatagtataaacaagttgagtttcatccaatttatggtaagcagctttagaggcatcccacatgactaccgcatcaaattctagtcccttagccaagtaagaaggcacaactagagtaccatcaactagtcgctgattagcagtcgcaattaaggtcgtgttttcaccttttttagctaattcttcatgcacaaatttagctgcagctaagtctttggtaataacagctgtcgtacgcttattttgttcattattatgcaaaacgttaactaaaacatcaattgcttcatcatcgttttttctgccccaaattataggcttaggacctttacggttaaaggcttcaatcttttcgccttgacgcaaaatttgcttggtgaaattggtcaattccttagttgaacgatatgatttcgttaattgcaccacatcagttttttcaggatcaaataagccagagatctgcttaagtaagctacgactttcatccttagtaaaaatagcctgattcaagtcacccaacattgtaaacttggcccgtgggaaattatacttcaagtaagctaattgaaatggagtataatcttgaatttcgtcaatgaaggcataacgcatctcaaagtcagtcctgcgaccagtgatcatgtcatacaaatataagtaagctgaaacatcattcatggcaatatggtgctgcttaaagttattcttaacttcttccacatgagccaaccaatcattttcatcaatattccacttagatagatcaaccatcttaggtacagctcgcaaaaagctcaggtattgtgctcgcatattcaaaaagtggttgtgcaaaatacgcttatgcacgcccttcaaggctgataatacaatttttctacctaaaaaggcctcttccttagcctcagactcaaattcttgatcaggtcgatcatataactcatttaattcagattggctcattccttcaatagcgtgtgccacccaagccttcttagtttctggcgtaatctttcgattcaacatcttgatcaattcttcacgcgttgcatcaattcggttggccaacttgtaattttcattgaaagaataatagatctccttaattttttccttatcaaagtaaggtttcttcttatcacggaaataaatattcttaaaaataacaccgcgcttattcaagtgctctgcataacgagtcaacaagttaaagaaattaactgaatccttaaacttagaaatattgctgtctgcggtttgatcttcaaactgtctgaataagttttcaacttccatacctggcaaccgtcgcgcaacaaactgccagtaagtcatttgaaccatattttgttcgcccatttcaggcaaaacattcttaatatagtcattaaacaactggttaggactgaacatgattacatcacttgaagtcaggttgccacgataacgataaagcaaaaaggctatccgctgcaaaatcgcactggttttaccagaacctgccgcaccctggacaaaaagcagatctgctttggtgtttcgaataatcttattttgttcgcgttgaatcgtcgttacgattgacttcatctgcgttgatgatttttctgacaaaacttccaagagcatttgatcaccgattgactcatcagtgtcaaacatgttcacaatcttgccatcttcaatcataaattggcgtttcttagtcatatcaactgtaatttcaccttcaggcgaattataagaaactttacccaatttaccatcataataaattgaagatattggtgcccgccagtcatagatcaagaagtgatcgtccttgtctgcaaaagaacctagaccaatataaatcgtctctgttcggtcctcatttttttctttaaaatcaacccgagcaaaatatggtcgcttctctaaacgctctacagtctctagctgcttagctgaatgttgccaagcatgttcacgttcactcaataattgttgctgctggtggattgacagtgctgtttccattgaagtggaataaccatcataatccaatttaacatcgtcaaaaaagtgtgaattaagctctcttgcttcgccttcagctgatttgatagatttttttaaagttttttcgcggtccttgatctgacccataatattatcaaggtgcttttgttcaagttctttttcgtttttttcagttttggctgtagccatctaatcaccttttctttaaaaattcgcataccattttaccatgaatagcgctttcataatagttttcctgctcgtgagaaaaatataaataaaaattgatgaaaactttaactttagagactataatcttgacatattggggtgatatatacatgaaaagattttttaaattactgagaaatgttctcttgcttgctcttatcgctcttggcgtttggacttatcagaacaatcccaatattcgtatcgcaacgcaagactccctagctacacttagctatcgaattaacgaacttctaactaacgaaacgaccatttctcccaataacgaaaaaaagactactaatatcaaaactgacacagataaaacagaaaatgacgattcttcagacaatcgtgtatggtcaaatcctgaagctaaggtttatatcgatattagcaataatgctcaactaagatcagctgcagtcaatgcaatgaacgcttggaatcgtaccggtgcttttacttttcaccaaataaatgataaaaaagacgctcaaatcgtcattaatacagtcgataatagcgacactaatgccgcaggagaaacagcaactacctataaccctgctacaggacatttgttaaaggccacggtcaacttgaaccgttactatttgcaaaacgaatggtatggttacagttacaatcgaatcgttaatactgctgaacacgaattaggccacgcaattggcttaaaccacactaataatgtctcagtcatgtacccaaagggttcgatctatacgattcaaccgcaagatattaaaactgttaaaaagatctaccacgaaaataattaactttaaaagctcacctcttttttctacaataaagtgtgagctttttacgaggagaaaaatatgaaaagaatttatatcgtccgtcacggtcaaacttatatcaatcgctacaataagatgcaaggttggtgtgacacaccattaactacaccaggaattgaaggcgctgaagaagctggtaaagctttaagcgaagtaccttttgacattgcattgtctagtgatcttaagagagcaagtgatacctgtgagatcatcatgaaatataacgccaacaaagacgaattgcagcacatcgctagtccatttttcagagaacaattctacggctacttcgaaggaatggattccgaaatggcttggcgaatgattggtggcagtcacggctacggaacacggcaagaaatgtttgctcatgagagcatcgatactattaaggattggattaaagaagccgatccttatcaccaagcagaaaacgctgaagaatattgggctcgtcttgatgatggttttaaattaatcagtcaattggatggcgctgaaaacattctgctagttactcacggcttcactattagaagtctctggtatcgttatggtgaccatattcctttggttccaggtcctaagaatgcttcaatcactattatgacaatgagtgagaaaggcgaaattaagatacctaagtggaatttaatgcatttatagcaaaataagattaggcgaatcgggcctaatcttattttgtttgtttcccggatttaaaattgaagtgcaacactaagtgttaaacaaaaaggccatgaagacctaaacttgaagtgacgaaaaatcaagaaaggaagatcttcatgaccaattcaaattctagcatttctaagcactatcatcaattaaccagcgtacaacgtggacaaattcaagcaatgctggattccggcataacttcccgtactgttatcgctcaagaagttggctgccataagtcgacaatcagtcgcgaaatcaaacgcggaagcgtcctgcaaagagacagcagctatttattgtatgagcactattacgctgatactgcacagatttattatgagaagcgtcgcaaaaactgctatcagcgcaatccattgaagcattatgctgtctttttgagaatgctctccagacgctttaaagctaaatttgatgccaccagcatcgatgaattcgttggtgaattcaaaaggactatgccaggctacccttgtcccagcacaccaactgtctatcgctatattgatcagggcttgctggacataagcaatattgatctgcctatgaagctcaaaagacgcaggaacaagtgtcatcacggccatagcggtcatgctttgcacaagaagcatcttggcaattccattgaacagcgtcctaaagagattgaagacagaaaaacgccgctgcactgggaaggagatctggttaaaggcgtcagacgcaagaatcagcctgctttaatgactttgaccgaaagaaccacacgctttgaagtagttatcaagattcctgactatcgggcaagcacatgccaaaggctgcttcaaaatgagattgacagacatcctgcctggtttaaatcgatcacgtttgacaatggctctgagtttgcggatatgaccgagatcaaaggctgccagatctacttcgcccacccatattctccatgggaaagaggcaccaatgagaactgcaatggacttctgcgtcaattcttccctaaaggcaaaagcatgaaagataagtcagctgcttatgttcaacaggcaactgatgccattaaccgcaaacatcgtcgaatccttcaatatcacacagcagaagaactcttcaagcaatatatttcctcatagcctaactgttgcacttaatttgacaattcaggattttgtttgtttaattatttttgcaaaacaatatttttatatagcttcactgttattaaaaaacttcctgaaactgtcaaatcttttgtgtaaatagttctttctcgtaaattgattttttaattatttatttaatcaaagtaggattctaaggtgtcctgaacctgaccaaagcctttatgaattcgattgaaataacggtcattgtagctcattgcctgaataccaataaaagcatcaagcgactgttcagttggaaactctgccttaggcttagctttgcgcttgatcacattgttaaatgattcaatcatgttagtcgaataaattgaagctctgatctgcttgggatagttataaaagaccagcagatctggttctatgtctttcaagcttctgataacatggctgtaaacctggccccatttggtatagaagtcatgcaggacagctgtggcttcttctttgtttgtctgttgatgcacctgtttgaattcgttcatgatcttttcacgatcgtcgacgcgtactttagcgcagatattgcgcatgacatgaaccaaacagcgttgaaaatgagctttaggataagtcctggccaaggctgttttcatgccaacaacaccatcagaaagaaagagttcaacttgcttcaagcctctggacttcatgttttgaagcatctctgtccagacttcaatgttctcactaggagcaatgcagtagtcaatgacttccttatgtccattaggtttaatgccaatggcaatatagactgcttcacgctcaacgctcaaacgtttctcggcgcaaaggaaggtatgtcgcatccaaatagacgcagaaaaacttgtcgcttagcttgcgtttgtggtaagcctcaacctttggaatcatctgcttggaaatatttgatacctgagctggactgtaatggctgccatacatcttttcaattagatcggctatttccctggtggtcacgcccttggagtaaagcttgataatcatgctttccaagatatccgagtgctgcttgtagtcaggcagcgtgtgctgatgaaattgaccgttgcgatcccgaggcacttgcacttcaattgggccaaattgcgtatcaactttgcggaaataagcaccatttctagagttgccagtattccagccatttctggcatagggatcatagcccagaaaggcagtcaattcagcttctagcaagttattaacagcctgttgtagttctttgcgcaataaatcatttattttgtctggattgaatagagcttgagcaaaatctttggtaaaatcattcatgaaggagttcttctttctgtatgtgtttttttgttcaaaccaatcatacgagaaaggaactcctttttctaatgtttaaagaaataaatttaaggaatcattcatccttacacaaactattttacagtctcaacttcctactatttttaacagtaggaagtcttactctaactaatctttagtcacttgttttagtttttattaacttacagtcgcccaaagtctgaatcaattgtttgccatctttttggtggaaaacagcgttttgatacgacaatcgttctttctttttactcttatctttatactttttaataaaggttacttcatagttaatccgactataattacgcttacctggtaaaacagagagcaccttgatctttacacttaatttcttgatactcttctttttatgccattcctttagttgcttagcaatcttcttatagtctgcattttcttttccattttcaaagtcatctgcatttggcgacttaagggtgttgtacaatagcttagctgcatccccaaccttaatcaagccaggccaaatcgggttaacaatatagtcaccttctgcatcctgatagacatctttttcgccattgccttgatattcagcagtaccatcataatcagtgacgtcatcctcactattagaaaattctgaactaatcgactgcgacaaatccgttaccctttcggacttaatagtttgaccatctgccttactcttaatatagatttccattcgcttagcaatcggataatccttgaaagtatagctaccatgctggttcaatttacccgccttacgatcattgatatagatcgtaccattaggaacgctgcgcacttggaaagtggccgttttgatcttcatatcaacagtcttatctgaccaaatgttaacaatcgaatcagcatctaaatggcgaccattaaccttagatttaactaatatatgatagcgaccaggaaagaccatacctaaatcttgatagtaattctgattgccaccttccatttcaccataatccttttggttaaccgtcaaagttgaattagcgtgattggtcttcacctgtgggcgatatacttgtatccacaacttatattttggaaaaagcaaaaaattgcgtccatcttgaatcagtctgatttcaccatgatcgcgattatgacgcaaattataggctaaacgtttagctgcactgtgatgctctttaaagtaattttgaagcggcttcagcgatttatctgtcacatccatatcaggcgttgaagccgtgacatactgagctagctcagttttaggatcctgcattttagctacaatgcggtcaatttgacgttctttagtgtaataaaaattgccaattagccatgcaataccaattaacaggataataactcccgatatccaaattttcttatgttttttcattgatcaaaacaccttttcacaaatccttttaacttagattaacaagttgatcaaaaaaagcaaacatcttttgttcacaaatcaagacgaagttcttattatatttagtagcattattttattttggaggggattgcacagtggaagtaaattttgattttgtaaaaaatagcagcttcaaggaagcctttcctaccgctgaaaaaatccacaaattatacacaattgatgattatcgtgacgttatttcaaattcacgtcttctattagagagtctaatcaaaaaaatttttaagttagaaaatctcagtccatattacacagttcatgatggcgaacaccgtaatttgcgtaataatacacattatttacgcaatgaactagattaccctctttcgatcatggatttatttgacgaaatacgctgcatgggcaacgctgctgtccacgataaccaaattgaaccagatcaaaagcaagcctggcactgtatttgtgatttacacgatattcttgtctttttaattaacagctatgacggtcaagacctatattatttgcgtcccgatattgcgatggaagcacaaactgatgaagaccattattatgtgcgccaaaataagcaaccaaaaataatgaaattgcatgatcatcaaaatactaagaaaaaacagtccgcatctgcaccaaaaaaggcgaaacatgttaaacatttttccagtaaacagcatatagagcaaactaactctgagtcacaaacgaaaactactccttccactaaagacaattggttaagaaaaattaaagaactctttcaccatgattagtcatattgacactatgtcacaatatgataaactatatattatataatttacataccgagaagcgcctatgacgctgccgatacgcaaatgaaaactgaacaagtttctcaaatggggaacggcttatgctagtaggtcgttttccattatttttttacgaaaggagtggttagtccgctatggataatcacaggcaaaaaccttgggctgtcgaacagtctgaggtattaacaaatacaaaaacaaccgaaactggtttaactgaagacgaagttcgaatacgccagcaagctggtttaaacgagctcgcagctaaacctcttaaaacagtaatccaaatggtcaaagagcagatttttgatccaatgatcggtatcttattagtagctgccctcttatctgctatgtttggcgaatataccgaagccattattatcgcgacaatcgtggttcttaataccattattggagtagttcaggaaaagaaggcacagtcttctttagctgcgttatgtgacatatctgcgccaactgcccatgtaattcgtaatggcaaagaattaatcataccggccaaggaattagtagttggtgatattgttaccttgcatgatggggacatggttccagccgattttcgcttaattgaaacagctaacttgaaaattcaagaagcatcccttactggtgaatcagtaccggtagaaaaagacgcagctgctgttttaaattcagattgtgctcttggtgaccgcatcaatatggctttttcttcctcaattgtgacttatggtcgtggtcaaggcgtcgtgacagcaattgggatgcaaacagaaatgggtgccattgctggcatgttagaagatcaaactgaagtacaaacaccattgaaacgcaaattagctaaagccggcatggtcttaacgactatcggcttaattatttgtagtttggtctttgcaattggtgctttctatggccgtccacttttaccacaattcttggttgctatctcattggcaatttcaattattccagaaggtctgccagcaaccgcgacaattgttatggccttaggcgttaaacgcatggttaagcgtaacgctttgatcaaaaagctgccagcagtcgaaaccttaggtaacgccactgtcatctgttccgacaaaactggtactttaaccttaaacaaaatgactgttacacaggcagcaacgaatgacttcagccaaagtcacgtagttgaccagcttgcagcaaacaaaaccaatcaaactttggcctatgctagcgctctttgtaacgatgccagcttgaacggtgaaaaagagattggtgatccaactgaggtagccttaattccttttgcccaaaagcttggctttaaccaatctaacttaaagaaagaattcccccgtttgttcgaacaaccctttgattcggacagaaaacggatgacaacattgcacaaaattgacggtcaattaacggtcttcactaagggtgcaacggacgaaatgttgccgttatgtacacacattatgactgacaatggcgtgcgtaaaattacaccccaagacaaaaagcaaattgcccacttgtctcaccaaatgcaagctgacgctttacgagtactaggctttgctaccaaaatagtggataacttacctgaagcaaatgctgatttggaaaataatttgacttttatcgggattgtcggcatgattgacccaccacgaaaagaagttgcagcatcagttaaaacctgccgtgaagccggtattcgcacaattatgattaccggtgaccacaaggtaactgccttggcaattgcgaaaaagttaaacatttatcagacaggtgacttagcaatctcgggaactgaattagaccaaatgtctgatgcagaattagatcaagctgttgaaaaggctaccgtttttgctcgcgtttctcctgctgacaaactgcgcatcattcaaagcttaaagcgaaattgtgaggtaacagctatgaccggtgacggagtaaacgattcacctgccttaaaggctgccgatatcggtgtcgctatgggtgtaacgggtacagacgtggctaaggacgtggctgatatgattttgcttgatgatagttttaccacaattgcgcacgctatcaaggaaggtcgccgcgtttaccgcaacatccaaaaagtaattcagttcttgctagttggtaacattgctgaaattaccactttgtttgcggcaactatttttaactgggatgcgccattattggcagtacacatcttgtgggttaacttagctacagctactctacctgcccttgctcttggcgtagacccagcaagtaaaaacattatgaaacacaagccagttaaagctggtactttattcgaaaaagacctagttattcgggttattacccaaggaatatttgttgccctgcttactttaactggttacttcattggtaaagaaaccggcaatcaagttgttggacaaaccatggccttcagtattttagcattggcccaaatgattcgttcatttaaccagcattcaaatactgatcccatctggaaaagatcatctggtaataatccatggttaacagtgtcattcattatctctgcatttttcatgggtattattctctttgtcccagcaatgcaagatgcatttcacattaccagtttgtcagctggacaatggttaatcgtagttaccctagctttactttcaattgcacaagttgagttagtaaaaggttgggcaaagtttagaaatatttttattaatgacaataatttaattgaagattaattagttacaaaaagacggtagtacaacactatcgtcttttttgatattaaactttggctgctgccaattggtcaacatctatctgactacgaccaatctgaattgccttttcggtactttcattcaagctagcattgatcatcttatggctaagctccagcaccattggcaaattaacaccgctaattacccgtactcgctcaggatacatatcttcatattccgaagcgactaagtggggtgtcccattttttaaatcagttagcaccaaaatctgactattctgatatttattcatgactttagcaaaacgagccttaaaatctctgattcctgtgtcgtttaattcaattgtcaggatctgatcattcttgcctgccaacatatcatgtgcagacattagccccgcagccaacccttcatgagttgcaattaaaagttccataaaacgcacctctttgtaagcgatttctatagaaccattttaacatatttttgtattaattaagctgttcaatatctgctaataagctactttgttcaggtgttagccgctcatccttttgccgtaacttaagtacttgtagacaagtgtgcaaaatcttttttccttgttccgtcacttgtttgccatccatatcaggcgttacactggctaaaaagtcatccatctcatcagcagtaaccttgaaaacatcattttctccatgaatcaagggcatccgattgagcatttcttcaatcatttgtaatttatttctagcttcttcaaaatctatcttgttcacatccaattctttttcttttattatacaaaaaaacagccacctaagtgactgtcatctttatttcgtattaataattgcgtttgaaattgtagttgcattagattcgatcagttgatgtgaattattaataaaaagggaagccccaattcctatagcagcaaatacaagccaaactttctgtaaaactgtactcttcatgttcccagctccttatatttcttattatataaaaagccgatcgttatggggatggctacgcttacaattaacataattgtaatattatttacctttacttaagagttacttctccagcaacatttgtatcaaaaaagtcagcaatttgatggacgtccatcccttgccctaaagcccacattaatttggtaatcgcactctcagaagtcatatcacaagcagaaatagctccttccagtaaagcctcacgccccacctcatatttggtcaaatcgctacgttcatacaagcattgactgctggctacaacgggaataccttgacgaattagcataccaattgcggctaccatgttgcggcgaataaagttcatcccgcctagaccatatgcttcaataacaattccacggcaaccactattaaccatcgcaaaaagcagattaggatcaaagcctggaaatagtttcaccaacgatacgtgtgaattaattttggtattcaaggttggctgaccgtcatgttctctttgaaaatgttctgaattaaaaactaatccatcggaagaaacggttgctactggtggcacattcacactttcaaaagcatcaaagttggtagtccgcacctttacactgcggcagcccagcataactttattatgaaaggctaaataaacatcaggtggacaagttgctgcagctgcaaaagccaaccgtaggttatcgtgagcgtcacttaggaccacgttaattggtacctgacttcccgtcagcacaaccgggatattaatatttttcagcataaacgacaacattgatgccgtataagccatagtatcagtaccgtgtgaaacaacaattccatcgtaatcattgcggtatttgtagatattttctgcaataaatttccattcttctggttggatattagaagaatctaattgcaaaatatcgcggacttgaatgtcgtacggcaactttcccaacattttaattaactcttcaccggtttccttgggtactaggcctgcatcagaagcaacggaagcaatagttcccccagttgatagcaataatattttcttcatcttgttcccctttatctcaaatcacaatgtcgaccataactattcatgattagatcaattaaaacataggccgaactaaaagttaccgcattttgcttactaaattgaaatggcgtagttttgaagaaaaagctatagtcgctaagagaggctaattttcccgtttgccagctagtcagtgacaccaatttcagttcagtattcacgacatcaatcttcttaagttcttcaataattgttttattaaaaccaccaaatgaaataacaaacagcatgtcattttcccgtgcagaccgccctaataatgccacttcgtcgcgtgcactaggcaaaataattgcttttttaccaattaagaaaaagttatgcgccaaatattccgcgataatttgctgctgccagccagtagagtaaagatagatcgtttccgcttgatctaaatccgcaaaaaatggttgtaagtttaatcccttaaaatatttaaaagtttcagcaatgatcttttgtaaatccgtattgaaatctagcgtttgcttgttcttaacgttttgctcctttcgtgtagctaactcggacaattcaaatttcaattcgctgaaaccgcttaatcccaattttttgcttaggcgaaaaatagcggacttagaaacgtataatttctgagctaattccagcaaactcaactgacttgctacttcaggatatttcaataaatagctaacgatcgctttatcggtctcattaaaactttcctttttcttcatgaccgctgtttctaaatccattctgtttcctttctcatcactgtttcttattaagaaaagaatatcatgtcgtactcaaaaaaggtagccaccctatttgagtaactaccttaatttttattcttgaattgaagttatgttatgacaattaattatttaagttctggccagtatggagcattaactggaatcatgtcatccaaaatcttcttagcaacggaagcatctggtacagtcttgtttaatgcaaatgcttgcagcatcttattgtatgaatgttcaacataagcatcaacaaccaatttttcacaagtttgttgttccatcatcaagcctctttggaagcgacctgctttacccgtagccattggttgaatgccatcagcaccaaacaatgctggtacttcaacaattgaatctggatccatattagaaattgcaccgttattagcacagttagctaagaacttttcatgagtgttaaatgcgatcgcatgacaaatatctacgatatattcagagtgcaaacctgaaatatcccaaatattattcttagcagttcccacctttacgattctttcacattcgccaaagacaatcttttgccggtgttcacgaatttcatcagtacgagtatgcttcggatcagcattagcaacttcatattgtgggaagtagtagtattgcatgtaattgtttggcaaagtttctggctctagcttatattcatcggcaactttcttaaaggtggcttcccaagaagcttcagtatccttgtcgtaatcgccacctacccaatagccgtgctctttgacatattccttcaacttaggcattaagtcttcgccagtcttcttgttgcgaacttctttccaccagccaaaatgattcaaaccataatagttaaagtcaatatcatgccaactgtccaaaccacaaatggcagccattctgtccatatcatcaatcggcatatcacaaatgttaattaccttagcatttggacgaagacgacggcaagcttctgcaacgattgcaattgtgttggagtagttgatcatccaagcatttggtgagtattcttccatccaatcaataatttgcaaaattgcgggaattgagcgaagaccataggccattcctccgggtccagtagtttcttgaccattcacgccatattttaatggaatcttttcatccaagcttctcatgtgatatttaccaacacgaattgatcccataacaaaatctacatcagtaaaggcctctttaggatcagttgtgtaagaaaacttaatttgaggtgctctttccttcatgataatttcaacagctttggcaatcttttcttgccgttcagcatcgttatcatagaacttcaactgtcttaatgggaatttatcctgactcttgattaaatcaaggacaaatcctggagtaaaagtactaccaccgccagcaataactactgaatatttcttaccatccataatctattttctcctttaaataaaactaagtttttatctctgtttcatttgccttacgcatatatttatatcatcttctcccacaaatgtattcgttttcaccagcttcagactttgtttcaagttttggaacgcgtttcactacgcgaaatatttttaaattttgccttaagcctaacaaatcaggtgtttaacttgcctttattagtaatagtgtaaaaatgaaaaaaataatcgtttcatgaccaagataaactataatttgaacattcctttaaccacaaaaataaatagtccgtatttgatgatcgtatagttttaatgaaactgtcaaatcttttgtgtaaatagatctttctcgtaaattgattttttaattatttatttaatcaaagtaggattctaaggtgtcctgaacctgaccaaagcctttatgaattcgattgaaataacggtcattgtagctcattgcctgaataccaataaaagcatcaagcgactgttcagttggaaactctgccttaggcttagctttgcgcttgatcacattgttaaatgattcaatcatgttagtcgaataaattgaagctctgatctgcttgggatagttataaaagaccagcagatctggttctatgtctttcaagcttctgataacatggctgtaaaccttgccccatttggtatagaagtcatgcaggacagctgtggcttcttctttgtttgtctgttgatgcacctgtttgaattcgttcatgatcttttcacgatcgtcgacgcgtactttagcgcagatattgcgcatgacatgaaccaaacagcgttgaaaatgagctttaggataagtcctggccaaggctgttttcatgccaacaacaccatcagaaagaaaaagctcaacttgctttaagcctcgggatttcatgttttgaagcatatctgtccagacttcaatgttctcgctaggcgcaatgcagtagtcaatgacctccttgtgcccattaggcttgatgccaatggcaatatagactgcttcgcgctcaaatgtttctcggcgcaaaggaaggtatgtcgcatccaaatagacgcagaaaaacttgtcgcttagcttgcgtttgtggtaagcctcaacctttggaatcatctgcttggaaatatttgatacctgagctggactgtaatggctgccatacatcttttcaattagatcggctatttccctggtggtcacgcccttggagtaaagcttgataatcatgctttccaagatatccgagtgctgcttgtagtcaggcagcgtgtgatgatgaaattgaccgttgcgatcccgaggcacttgcacttcaattgggccaaattgcgtatgaactttgcggaaataagcaccatttctagagttgccagtattccagccatttctggcatagggatcatagcccagaaaggcagtcaattcagcttctaacaagttattaacagcctgttgtagctctttgcgcaataaatcatttattttgtctggattgaatagagcttgagcaaaatctttggtaaaatcattcatgaaggagttcttctttctgtatgtgtttttttgttcaaaccaatcatacgagaaaggaactcctttttctaatgtttaaagaaataaatttaaggaatcattcatccttacacaaactattttacagtctcgttttaattacaaaatacgactcaaactagtttcacttccatattttgtagtgtaattttgaaattaattataattttaatatctttctgctattttctatacaatataatatttttaaaacatatctttgctaaacgctgattttatcccaactcttagtcattagtacttgataatttacagataacttaggttataattatatatttttttatataaatttagcctttatcaaaaaactttcgaattatttattaaccgtatagtttttattttaggtcgccctaagtcttgataaactagtactctaaaaaaataacatccatgttttttatttaacacgatacgttattaaagcttttcatgtatagactttgtttttaataatgttagtatcattccatgaagagacatataacgagctttaaggaattgactactccttaagcaaaaaaatgacttataaattggaaatccttttcgtaatataaggggattaagaaaaatgacaaagaatgttaagctattatcacttatcggtatcgcagccgctttagcaggtggaagtgttgctatttcaaataataacaactctactgttcaagctgcttctatcacattacctgctggttacaccaagagtgccattattaaatggaaccaaactggtaaagcaagtaaggctttgattgatgcttctaaaaaaggcatgaaggaaaacaccaatagtgatgcgggttcagataatacgttagttaacgtgactaaattaactgcgtctcaacaaaaagaactgagccaatacactttaagcttaattaattctgcacgtcatcaacttggcaagcaaggctggacttacaaacgaggtgctttgcactttgcaaatcgtgtagctaacgaatactacagccataacagatcttgctgggatgccgaccactatgttactggaattgaacgcgcagctaaggcttctggccttaactcaaaagtaggtcaagtctacgaagatgaagctggcttacctatctcttcaacatacaatactaacttacgtccaatgtcagtattgaaaaaccaaatttactttaacgtaaagcaaatgctttttggcggttttgcaggctctgacagtcagatgaatgactcatctagatacactgaatgggaacacgctggtgatttacttggttgccgtactaagagctacgatgctaagactaaatactttggtattagtttcagtggcttaaagggtgaccaaagcaaggttagtgttcacatgatgggtgttgctaaatgttacatccaaaactacagaaaattcaatcattaaaactaacgctgtagttaaaaacttaatacagtttcctaatccaagagctcaagtagttcagtcaactatttgagctcttttatttttgcccatttttcatcaaaatcctgtcaaaaaaatgcagatattcacacattttcaattaagctatctaattgtttgtatacattagctaatactaatagtgtgttaagttattatcttatcactattttgtctataatccttgataaatcaatgtttccagcaataactgtacataattaacaacagtacagcaaattatgattacaattaataaactttttcaaaagcatttttacgttatccatgcgggattttcgcttacacaatctattacattattgttatctaaaaaaaggattgctatattaaatagtaactggtatattctatatcaatatgttcaatgaacataaaaaagggaggataaagatgtatttcactactacaagaagaaaaactaggaaagacaggatacatatccaattctttgcacaagtcttaaaaaaagacctatcacaaggaactgtttacaagtattcagttcaaagattctgtgaagctgcaaatatctgtcgcggaactttttaccgcaactttaaaaatttgaatgatctatttagtcaagtactgcaattcgaaatcaattcttgcttcaacaatccccaatcaagtactttacataaaaaagcacacaacttactgatagaaattgaaactaatgccacctactatcgaaatgtacattctcttgcctcaagtcaaattcgaacacaagttgaccaagctctttttcgtgaaatgcaaaaattgctattcaatagtaatctttctaataagcatatccaaagcatttccagtttgattcttattcgaattctagactggattgctcatgactatcaggacaatgtcatcacagtttatactgacgttgaatgcctttttctccatcacattaaaaaaagttgctagcaacgaataccaatgtcattaagttaagacattgacaattaagggtgcttttttagagatcgaatcatttggattcgatctctttttttgtataaaataaaggcgaaaagaccagccttttcgcctatcttatatattatatattttaaaccttcaaaattattgccagaaagatggtgttaattatgaaagcccttcataagaatattctagaacgtcttgatcaaattatcaataatactggggatcatattcacgattttattaataatcctcatgcttttaccaggaaacgcactttagatgcagcgacagtccttaaaactacaattaacatgcaaggtcagaatttaaacagtgaactctttagagcttttggcgaagatgcaactaaaaagaacgataaagtagttagtacttctgcctatgttcaacgcaaaagccagctttctcctgcttgttttaaacatattctgactgtttttaatcaaaatctatttaatattcaactttttgatcatcactaccgtttgtttgccattgatggctctgactttaatcaaatctggaatccgaaatcgaataacattgtacaagcttcttctcataaaaagaaaccctattgtcaaattcacgttaatgccttatatgatctattgaataatacctaccaggattgtatttttcagcctaaatcagaaatggatgaacgcaaagcggctgttcaaatgcttaaagctttgaattgtggtccatatattgtaacaatggatcgtggctacactagtttcaatatgattgaaaactgcaatcgcctgcctaactgtcattacataatacgaactaaggctggacaaggcggagttaaagaaataacgacattgcctgatcaagaatgtgatcgtgagatttcctgcctggtaactacttctaactattactacatcacgcataaagccagtgagaatattcaccatgtccagcatcattatcgccaatatattaagtatcgctctaaaaatacccaggatctaagctgggattttggcgagttatgcacaataaaatttcgagcctgcaaatttagaattaatgatgccaaatcaggcaaagaagaatgggaagttgtgctaaccaatcttgatcgaaaaaattatccgctaaaaagaattaaagagctttatcatctgcgttggggtattgagacctccttcaagaaattgaagtattctttaggcagtgtacagttccattccaaacaagataaatttattgaaatggaaatttatgcccatatgattatgtttaatgcaatcagtcaaattgatgcacaggcctatattccgcaaaagcattgcaagtatcaatatgccatcaatttcaagcaatcatgcttgattattcagagcatgtatttggcttcttctttaacgcaagattttgaacggatccttattcagatcagctattataccattccaattagaccaggccgcaaggacaagagaaatattaagcccaaatcagctgtatattatttatatcgcgtagcttaaaaaagcagaatctgtgctatgccttatttgttgtacgaaaaaagcaccaatttaaccaattaaatgttaaatcagtgctttaaaagtctaatattaattgtcaatgtcttaacttaatgacattgaaacacaggggtcttgctttttttattatagacaaaaaaagcaaggaactacgcgggaaaggcatgatttctagctttcagcctttaattaaataaaaaatctatttatgatatacacaaactgttctacagtctcaagaattgttattatcatttatttcctttacaatacctgatttgtcaaacaactcataaaattccttaatgttttttttagtttgataaatatttctaaccgtttgtcttcctcgacaaaaagtaaagtacagcttttctttagcacgtgaaattgccacaaaaaatgctttacgatcagactcagattggtttgagaaactccaaaaagcactatcttctaatccaataaagtaaacagaattatattctagtcccttactcttatgtatagttaaagttgctattgaattctttcctaaataattgtcaattatttctttccatatttctttgatgtcagtatttaactcatttattgatccgcattctttaagctgctctataaattgagttttcgttctatttaattgatctatttctaagtattctggatagtaaacttgaagcctattaatcgtaaaaaagtctattatagattctacgattttacagtaataattactttttgatctattctcatggacttgaaccaatagatttttaaatagcttatcaaggaatacatttaattttttgatatatttttgctctatttcagcatcagctaaattaatgagaaatatttcagaagtctcatctaccagttcttgccactcctgtccatttatcacgttaatagacgctaaaatcattttcaaaatcaacttaactataggttcagagaaagtttcagtatactttgattcaaccctaacagttacatttttagtttttaaatactcttttatatttcttatgtaatcttcagggcgttgttttactaatatagcaatttctgaaggcttaacacccatacgtatttcttttataatattttccccaacaatttcagcttcttttgagggttcgttagtttctattagaaaaactttcccttcatccttatttttattaattattatgtcagggtttatatccttatctattttttcatacataagtttttgtaatttcactatatttaaagctgatcgatgattttcttttaaaaatacctttgttgctctaaattcacgcgtatactttccaaaaatttctttatccgcaccagcccataacattatttgctgcttattatcccctacagccgtaattttactttcactatttaaaaaacattcacggaaaatataatattgcaaaactgtagtatcctgaaattcatccagaaacacaaaaggaaaagctgatcgaataatatgtcttacatatttattatgctggataatatataatgctagtctagaaatcatttcaaaagtcaaatacgttttttcttctcccattaacatatacttccaaaatttataattattactctgagggtttatatcattcaaatctactttcaaaagatcatttacagcgtttctatcaggaacatagccgaaggcatgttcgtatatttttgtttgagttgaattagaggagatttcatactgaggtctaggtcgtaaatctttcggcaatactaaataaaatctgtccactattaatttagcaaaagcatcaaaagtttttgaaataaatctacttccctcttctttaccaactctttttgaaactctatctttaatattctcagcagcatcacgcttaaagcttattgctaaaatattaaaaggagcaggacataatcctgtttgaaataaatatgatgctttctgtgctaataattctgttttacctgctcctgggcctgcttgaaccaaaatattatcatttgtaaaaatagcctgttttgcatttgattctaaaactatcccattactaggtttccattgatccttattcatcatttttcttatccaatttattctttacagactcaagtaatctttttaattgttcaggtaaattattgcatagctcttcttcagatatatcttccaaagcagtaaaatgtactaatggttttcctattcctaagaaaagcatattataccatctcattaattctatatcatttttatcataatcaacttccaatgtcattaagttaagacattgacaaattatcgacttggacttttaagatcattcatttgcgatttatcgcatttgaatgctcttttttcatgccaaataaacccaaatcttgtttagaaattaggctacacgatataaataatatacagctgatttgggtttgagatttcttttgtcttttcgtcctggtctgatcggaattgtgtaatgactaatttgaataagaatctttttaaagatttcagttgaagaagaaattatatacatagcctggatgacaaaacatgactgtttgaaattgatcgcatattgatacttgcattttttttgtggtacatatgcttgagcatcaatttgactgactgcgttaaacataatcatgtgggcatagatctccatttcaataaatctatcctgcttggaatgaaactgtacgctacctaaagcatatttcaactttttgaatgaagtttcaatgccccagcgcaaatggtagatttctttgatcctttttaagggataatcggctctatttagattagttagaacaacttcccattcttctttgcctgatttaggatcattaattctaaatttacaggcacgaaattttattgtacataactctccaaagtcccagctgccatctttggtatttttagaccgatattttatatattgacggtaatgatggttaaccaaatgaacgttttctgtagccttatgggtttcataataataattagaggtagtcacccagcaagctatatccttatcacactcttgattaggcaactcagctacttccttaaatgcgccatatcccgttttagtacgtatgacataataacagttaggcaggcgattacaattttcaatcatgttaaagccggtataacctcgatccatagtaactatatatggtccgcaatttagctttttaagcatttgaacggcggctttacgttcatccatctttgacttaggctgaaagatgcagtcttgataagtattatttaacaggtcatagagtgcattaacatgaatttggcaatatggctttcctttatgattgagatttccaacgatattctctgatttaggattccagatttgattaaaatcagacccatcaatggcaaatatacgatatttatgatcaaataactggatattaaataaattctgattaaatacagttagaatatgcttaaaacatgcgggtgaaagctgacctttgcgttggacataagcggaagtactgactactttatcgttatttttaatagctttttggccaaaagctctaaacaactcactggtcaaatcttttccttgcatattaatagtagttttaatgactgtagctgcatctaaaaaccgcttcctagtgaaggcatgaggatcatcgataaaatcatgaatatgctttccagtatcattgataatttgatcaagacgatctaaaatatttctgtgaagggctttcataattaacaccagctttctggcaataattttgaaggtttaataatttaatcagagggcgaaaaggtaggttcttttcgcctttattttatgcaaaaaaagaaccaaatcataatgattcggttctacagagattagattcaatttgtcaatgtcttaacttaatgacattgaatcaacttcttcctctctttttccttttaaagttctatccaaaatttttttgcgttcatccgctttggtctttggacttcctgatgctattcctttatatttatccagaaaagctgctaacatcataaaatccaaatctaaaggaaaggaaaagaaaacatcatacttttctagttgtttcgtcaaatccaacaaattatttttattttctgctaaatcggcgcatttgttttctattttttctaattcgtcatcattaggattaaatcgcttcaactcatcaataatatctttaattcttttctttccgcctaaatatctcccataatcaagatctaacaaagttatatgtgctatatttaagctttctaataaatcccacaaataattaaccattcgtccagctaaaggtacaattgatatgtttgcttcatctaaaccagtatacgaactaattattttcgataaaactatttcttcactctcgccttcacctaatattactaattttgaaaaatacaattctgggtaagtttgaaccgctcttttaataaatttatatttttctcctttgtcatcaggcaattttattttcttcacttctgtcacggcatcttttgtcaaatgaaaatagcgtacattctctggcaatactctttttattattgctggagaatgagaggtgattatagtttgtgtattatctaatttagttatgcttttaactttatccattacttttccaagtaaatgaggagaaatatgattttctggctcttctaatgcaaatattgttacaacaggatattcaatttttatatcatcctcttgtaccgtattttctattgctaaaacacttgcaatattagaaatataaaacaatgattttattccgtcactcatttcatccacagaaaatacattattagttacatttgaattaaattcaaaccgtatacgactcataatcttattgatatctatgctagatacactagcttttacattagaaaatctagaattaggttctagacttttccattcttgatttaaagtatcttgtattaatttacttcctttttcgtcccaaaatgtatcatttaattgtgatgaaatgcttactatcttttgtttaatttcatcatcccaattaactctttttatcaattgagaaatcattccatctgaggtattacttaattgtcgttcaggatttctaactgcaggtacataaatgaactgtatactgcttaactctgatcttctagctactatcttattttcttcattattatcttctagagaagtcatgaagtaaatatttgtatctgctgttccatcagcaattcctgaattcgtccaagtagattcaagtctaattcgtaaaagcggcttatcttgtccgttttttatgattagccgattccaatactgtgcttcacacttcttatcttcgtctttattagctttatctaactcaaaaacagcttcaatatataggtccctcgattgactatcttgatttgctgaatttatataaaaatctgattcatgtattattctatccgatgcattatatgagaataatttattaagtgcaagaagacaggctgttttccctgaaccatttgtaccaataaatgctgtttcttttgaaaaatcaattttcgtttcttcattgaacgatttaaatcccttaattagtaatgtctttagtctcaatctaatccccctcatctataatatatcgttattcaaatacacttaactaatgccactattcttaattttactctttttatcaaaaatcattatttaaatattcaaaaaattttatttccggatttaaaattgaagtgcaacaccaagtgttaaacaaaaaggccacgaagacctaaacttgaagtgacgaaaaatcaagaaaggaagatcttcatgaccaactcaaattctagcatttctaagcactatcatcaattaaatatcgtacagcgttggtgaattcaaacaatattgatgtctatgaagctcaaaagacgcaggaacaagcgtcatcacaaccacgacggtcacgctttgcacaaaaagcatcttggcaattccattgaacagcgtcctaggagattgcaaacagaaaagctccgctgcactgggaaggagatctggttaaaggcgtcagacgcaagaatcagcctgctttaatgactttgactgaaagaaccacatgctttaagtagttatcaagattcctgactatcgggcaagcacatgccaaaggctgccagatgatctattttgctcacccatattctccatgggaaaggggcaccaatgagaactgcaatggtcttttgcgtcaattcttccctaaatgcaaaagtatgaaagacaagtcagctgcttatgttcatgccattaaccacaaacatatccaaatcttccaatatcagacagcagaagaaatcttcaagcaatatgtttcttcatagcctaactgttgcacttaatttgacaattcaacactttcaacctttagctatatcaatctaatctattccaaattagattatcagtaagcggaatagactggagtcttatttgttcatcaaagtttttacattcttttcttaaaataagtactggtctaacatcatttaaaaatttcaaatttccttcatttatcttattatgaaattctcggtttagctcaaacttacttattacgtgattttcaatatccttcatttcatttattggcaatttcttacttaatttataaagatctaaatagtaaataaagtctgctttaatttcatcattccatttttttacatttgttgctggaaatataatattagacaaaaaaattctatatgaattatcatactgtgctttattttcaaaatattcaaaatttttatttgcatgttttaaatacaaattagttctcatacgatcattttcatataaaaaatattttatactatgtggattagaaaatatcttgcattcagtaatcgcataggcttgatcatcatctataagaattatatcaatttctttttttcctgatttatcacttattgtatttttctttttttctatactatatccagactgttttaaaaattctattacataatcttcaaaccaatgccctttcttattactccatttattagtattttccataagtcttgtaactaaatatactggatccacacaataacaagttggtaaatagacaatattgccaaatataaacggagcatccattatatctctatgatacgtcaacttttttgtgattttaccgaaactgtcaaatcttttgtgtaaatagatctttctcgtaaattgattttttaattatttatttaatcaaagtaggattctaaggtgtcctgaacctgaccaaagcctttatgaattcgattgaaataacggtcattgtagctcattgcctgaatgccaataaaagcatcaagcgactgttcagttggaaactctgccttaggcttagctttgcgcttgatcacattgttaaatgattcaatcatgttagtcgaataaattgaagctctgatctgcttgggatagttataaaagaccagcagatctggttctatgtctttcaagcttctgataacatggctgtaaaccttgccccatttggtatagaagtcatgcaggacagctgtggcttcttctttgtttgtctgttgatgcacctgtttgaattcgttcatgatcttttcacgatcgtcgacgcgtactttagcgcagatattgcgcatgacatgaaccaaacagcgttgaaaatgagctttaggataagtcctggccaaggctgttttcatgccaacaacaccatcagaaagaaaaagctcaacttgctttaagcctcgggatttcatgttttgaagcatatctgtccagacttcaatgttctcgctaggcgcaatgcagtagtcaatgacctccttgtgcccattaggcttgatgccaatggcaatatagactgcttcacgctcaaatgtttctcggcgcaaaggaaggtatgtcgcatccaaatagacgcagaaaaacttgtcgcttagcttgcgtttgtggtaagcctcaacctttggaatcatctgcttggaaatatttgatacctgagctggactgtaatggctgccatacatcttttcaattagatcggctatttccctggtggtcacgcccttggagtaaagcttgataatcatgctttccaagatatccgagtgctgcttgtagtcaggcagcgtgtgctgatgaaattgaccgttgcgatcccgaggcacttgcacttcaattgggccaaattgcgtatgaactttgcggaaataagcaccatttctagagttgccagtattccagccatttctggcatagggatcatagcccagaaaggcagtcaattcagcttctaacaagttattaacagcctgttgtagctctttgcgcaataaatcatttattttgtctggattgaatagagcttgagcaaaatctttggtaaaatcattcatgaaggagttcttctttctgtatgtgtttttttgttcaaaccaatcatacgagaaaggaactcctttttctaatgtttaaagaaataaatttaaggaatcattcatccttacacaaaatattttacggtctcattttaccaatatcattcaaataattattaggtataggttttaaatgattattaattatttttatataacgatcgggtaagtcaaaaaaatttcttggaacatttcctgatattaagtaatctacctttaaaaacaatttatttttctttaaagaaaaaaacacttctgctataatttcacaattatattgaattatatttaaaacatccaaccattctattattgggataccatataaagtttctgcacctaatttttcataatcttcacgattctccttattatcaggtaaggatggtaatttataaaataaattttctgcaattccttttaattggtataagccccatctacatggattctttttatctatagaataaatatatttactatttaattgtctaagatccgaattttcatttctatttacaatataagtagcacatatatcgtttacagaatcaacaatatatttctttccatgtcttataattctagcatttccatatttccaaaactctattatgttgtaaaacatgtctatatttcgatcataattcgtcgaatttaaggcttcaagatcatttatagaatttacattttttaaattagatgcaagacgtctagaaaaagaaccgcagtttatttccatcttttcattcaaagtttgtttactattttgattatggaaagcatttattacttgatcaaaattagtaccataatccaaagtctttgattcaattatttctttctttatattcttaaggctctctaaatcctttaaaatcatagatgccttattttttattcttggacaatagtctccaactatgatttgtttcacaacttcaagatacttgtctctagtatttgaccaattaccataatcatcaattatcaaattcgatgatttaatgatatctaaaattctagtaagttttgaaaaatctttcttacgtaaattgcaataataaattgaacacttaagctgcttgatagatatgatccaattctctttcaaagatttcatctggtgtatgatatgccaatatttttcttggtagcgaattgcaccaggtttcaatgtcaatgatttcctgaagagaatagttattgatgtaatcacccttaggaatgaatctgcgaataaggccattgtgtctttcaacagtgcctttatcgcaagaagtatatggatgggcgtaatagactaaggtattagatacttcctctagattggaaagatccgcaaactctgaaccattgtcagttgtaattgtcttgaagatttcattccagtgctcactatactgtttatgtagagtttgaaaagcgctcataacactggcagctgtcttgtctggaatacgcaagattagaaactcacggctcattcgctcagacaaagttagcagtacttgatcatctctagtcttatgtcctaagactaggtcgcattcccagtgaccaaactcttttcgatcattaatctctttagggcgttcttcaatgtttcgacctaatttcttcttgttcttatgaacacgatgaattttagtattacgctttaacttctcaggcaaatcagagtttttgatagccaacaagccttgatctacatagttatatagagttctagggcagactatctggtcgctgctaaattcacccacagccaagcagcgattggcacatacatcaagtgaccaattgtcttcaaagaaatgcttattgacatacttgataaagtcagatttcttcaagaagtctggtttgcgaccacagtggcgtcggttagtctgataaacactttgaccatgatcagccttgtaacgcttctgtttgccacgataaagaggaacagtgcctcgtctaacttcgtaactgattgtagaaggcgaacagcacagctcacgagcgatagctctgatagagcagccatccttcaagcgagtttgaataataacccgttgttcaaatgataaatgctttcccttttgatgctcaggcatgatagaatgtaaagagtccatttgtgacctcgtttctgaatgttttgtggtaattacattttatcaaacaggtccaaatggactttttatttttctaaagtgttcaatttgattttataatcggcgaaaatctttcttatctaaattcaagtatttaatgacctcattataaaattgttcattgtttctattaacatcttctaaagcacaaatagacggtctcttcatagaaactttatgctcttctttcttcgacttctttgacattttgtatcctcacttttcagcgtttaatcacaattcgtttaaaataatgattaccatcagaatctctaaaaacaggtgaaacgattagttcatttttatcattaccaaacttttttatttcttttgccccctctattatagattcagcctcaaaattatattcattaccaaaacaatgtggcataattaactcggcaaatggtatcattttgtaaccattagaatattgaggacaaaatatctttttttcataaccatcttgtctatcttgaatacagtcaatattcttccataagcaaaagccaactaattcagcactttcttcattatttccattgcataatgcacgcaccttaaaactatcctctttattcacttgtattgtgtcacttagatattgaactttattacctgtaactcttatttcaagtacttgttcttcggatatattctttattccaaacgctatcaaaccactaataattccaactacagcaaataaattttttcctagttgatataaaatcaatggattactcatgaccacaggtatataaataagctgtatagctaaacttactaaaacactaatttgccacaacccaataggatacttattcgccaaaacactagttttgacgtttaaactactaaaatatactatgaagagagttacaattaaaaatactattatccatgtaaggtagtctatccaaagattcttacttatgaacatcaatattaataacataatatttactaatccaaacgtagtacacgatgaaattaaaagtgaaatcagaaattgtcttgatttcactttttttagtgtcaacttattttttttcatttgtattgtcaccttctaatcaatctcgctagtcttcaaacgtacaatactactcctaaacttatctaaatcgattcctaaaatttgagacagaatttcatttggaaatacaataccatacatttcacgtagtttatcattaagatccttagggtgaacaacatcatgctcttctagtaattcaaatgcttgatttagagccttaggtttcgacatgattttctcatcatccattatttctttagtacgccagcctctatagcttatctgtttttgtagcttgatatattctttatcatcaatcaactgaagatcatgagcccgatgaaccattgcagctattgatacattccacttagacttaagatttataaatgtatctatattaataaatccatttttagttaaatcagattcaaagctttcctttggcattaagaatgctgacgcaaattgattagcttcattttcgatagttctatagtcttgtcccagtaaatcttcttgaggataatagagttttgcatgcattgcatagtgacctagttcatgtgctaaagtaaattgatccctgaagaaattctgcttttttccattcactaatactatgtagtattgcttttcacctatttcaacataaccgcttctagcatcaatcttattagaattaaaatcaacattaacaattatcaaaccatgacgttccattaaatccacaatatcgctaattggttgatcatccagattccatattcttcttaattcattagcagcattttcaggtgattcttccaactcaagcttcgtatctaattcaggaaaatctatataattttcaaaataatctcttagatatgccgctgcttttttataagttttactaggctgtttttcagattgagtagctgtcaatctgctacgataaaaagtaccatcatcttggtatggtactttctcgaagtctgtaaagaaatataatgggaaatttagtacttgaactattttttgaaaaacagctgaactaatttcaattttgttgtgctcgtatttcgatattgcttgtttagaaacaccgatttgatcagccaaagcactcatagttaaatgattaaataaacgcgcttctttaagccgttttccattaatttgaagtgacattattattctcctcactcgttgtcggcctcttagccttattagcattccatttgacaatactatcagacttattaccttccacattattcttttgattatcatatctagttgtatcatcatcaggactaggagatttatactctggaattactatctcatctatgacattgaaattgttatcaactaaaatttccaagccattaacagcttcatcatcaaaataatcataggtaattataatggttctttttaatttagtaaaatcattacctaaaattttctttgcttcttttaatctcttttctgctactactttattatttccaatcccctctaatgacaattgctcagcagaagcgacattattaattgttaaaggatacatatagtgagtatatttaccattttgaatcttacgttgaacgactagaaaatttgtatatgaagtaactaaatataaagtaccatctttgacattaaaaacacctattgccttccaaatatgccggtcaattgaaatctcgactaaccatggggtagaagcaatatcatcagaaatagtattaaatctgtggtcccaggtattaaaggataacccattaatatattctccccctgcttcttccatataatcatccctaacctgagatttagtaatggtcgcacctggaacgatctttcatagtacttcatcgtcagctttaaaaatattcatgtagtatttcctccataaaaaatatgctatctatttacgcttataatagacttatttactgcagttttcaactaatagttgacaaaattagtgcattttctaaaaggtgatataattatctttgataaaggaagaaggtgactatatgaagaaaactcaacacgttgttcacaaccataacggtggatgggatgtcaaagcttctggagcaaaacgagcaaccaagcactttgagactaaagcccctgctgtcgaatttggccgcaatattgcgaaaaaacaacatactgaattttttaatcatggaaaagatggaaaaattcaaagtcgtgatagttatggaaatgacccatttccaccaaaaggataggtgtctattaatgaatagtgatactaaattagtatttcagttgttagaaaaaaatgctagctcagagcgcccaaccaatattacatgtgacaccagcgacattctacaacaatctggtttgtctattgcaaattttaacaaggctattagtgagttaaacgagctaaatataattaatattactccaggaaataatattgttgctgatattgaattgcttcgaatcgattagcttagtaaatattaaatagaaaagtatcttctatcttgatgggatcagattaatactgaagtcatcattttaggagatattttttgttggaaaagacaaacagccaattattgttttaaaacgccgtcaaacccaacctcaagttcagtcggaaaaagctcacatgcacaatatcccttactcagccttaaaagaaattcaaattaatggttttactgtgaatcaccagaagcctatatgcatatcctgttggatagctattcaacaataaaacagggtacatagtaaagcactaatgatggtcaattagcaattttcacaaaattttgatagtgcccatccacaagaatatttttagcttaatcgaagctactaaacgatattgccttattagaactgacacaggaaaatcataatcaggaaaaaactgaccatcacttattaataactaaacatgacaacactattgcccgaaaaatcttatatcgaactattgggcaaatggagacagttaagtcagctcaaccttgtcatatacggattactatgaccataaaaaacagctttctgaagccagaggctacaagaaagctgctattgcgtctatgcataaactgatacggacaatctatgctctgattattaatgatcaaccatatgattaccataaagctctccgtaatcaaagataatgattaatcaatttataagtatatcagcctgcacaaaatgattaaagtggagactggttttgtcatgcactgaatttggtttcagactgactttgatcttattcgcactattcaaattcttctttaaatcattgataacacttgattttagatagaaaaaattagtttttaggattgggttgaataagtaaacatttaggaaattgtgattcgctataattaaaactaataatttttttctttgattttaaaattttgatttcaaaatttcccaaataatatagctcaaaatatgactgagaagaagtatgatctttttcccatcgatcagcatatcgtttcaaattatcaaacaaagttttacaacgagcgttttcaaaggtagtaggattaatgattacctgtggtttagcatttacaccgtttaaccaagcagctggaccagaataatttaaaattaaactttgactactgtcattattaaagtatctacaatatgcctgtccataatatatatgaactgctttatccaattgtgcttcctgcacctttttaaaaaacaaattaaaatcaatttgatttccatccgcatcgtacactttttgatttaaattatattctttataattatcccacagttcaacaatctctcttaattgatttgtatgatgcgcacgcttttgataattataattggaattttcattttttctattataattatcaacaattctagttggaatatctggatgattatttgaacttactgctattttttgtgtcggtttcaaatttgcaattaatccagttacttttgaaaaatcaaatattattttatcattttcaaaatagtaaatttgatttttagtgctatcctttcgatgctcagcaataaattgtaattttcttggacaatcaagtgaatgaaattgattgtgttttctatttgcataatatggtcttattttatctggatgattatcaaaatcaacaaataaattaatgcaactcagttcaactgaacattctttagcacagtaaaaaatagtattttcacaaatacgacggtaaccatatactttatttatgtcttctaaatatattttattcgcgtcagcagcagtaaccattccatcaggataattatcaggatctttctccattaatcttttacagaatgctttttcatattttggcataataatttctcttttcttttttaattatattataggatcatgcctcacatatggaataaaatttatagattttttaatatttattgtcgaccgaatttaagattgacgtgcaacaataagtgttaaacaaaaaagccatgacgacctaaaccaatgtcatcaagttaaaacattgaccataaaattgtacgtttttgagaccgtaaaatattttgtgtaaggatgaatgattccttaaatttatttctttaaacattagaaaaaggagttcctttctcgtatgattggtttgaacaaaaaaacacatacagaaagaagaactccttcatgaatgattttaccaaagattttgctcaagctctattcaatccagacaaaataaatgatttattgcgcaaagagctacaacaggctgttaataacttgttagaagctgaattgactgcctttctgggctatgatccctatgccagaaatggctggaatactggcaactctagaaatggtgcttatttccgcaaagttcatacgcaatttggcccaattgaagtgcaagtgcctcgggatcgcaacggtcaatttcatcatcacacgctgcctgactacaagcagcactcggatatcttggaaagcatgattatcaagctttactccaagggcgtgaccaccagggaaatagccgatctaattgaaaagatgtatggcagccattacagtccagcccaggtatcaaatatttccaagcagatgattccaaaggttgaggcttaccacaaacgcaagctaagcgacaagtttttctgcgtctatttggatgcgacataccttcctttgcgccgagaaacatttgagcgtgaagcagtctatattgccattggcatcaagcctaatgggcacaaggaggtcattgactactgcattgcacctagcgagaacattgaagtctggacagatatgcttcaaaacatgaaatcccgaggcttaaagcaagttgagctttttctttctgatggtgttgttggcatgaaaacagccttggccaggacttatcctaaagctcattttcaacgctgtttggttcatgtcatgcgcaatatctgcgctaaagtacgcgtcgacgatcgtgaaaagatcatgaacgaattcaaacaggtgcatcaacagacaaacaaagaagaagccacagctgtcctgcatgacttctataccaaatggggcaaggtttacagccatgttatcagaagcttgaaagacatagaaccagatctgctggtcttttataactatcccaagcagatcagagcttcaatttattcgactaacatgattgaatcatttaacaatgtgatcaagcgcaaagctaagcctaaggcagagtttccaactgaacagtcgcttgatgcttttattggcattcaggcaatgagctacaatgaccgttatttcaatcgaattcataaaggctttggtcaggttcaggacaccttagaatcctactttgattaaataaataattaaaaaatcaatttacgagaaagatctatttacacaaaagatttgacagtttcatatcaccttgagtatcacatatcctttttaggtctttaatagcatcttcgtaatttcctaaaaaatattcggttaatccctttaaatacttaatattaaccttaaattcattataatcagctatttgttgccataattctaacgctaattcaaagttgttattttgcaaagcatatatgccatttattacatttgcgaaattctttaactttttaggaatatattctacctttttactggtattcttttcaaaaagtagccgtacacccttttctaaaatttgatattttggattattatcagctaatctagcacttactattaaagcatcactattattactatttacatccgcttttaatatccgcaattctcctacactagtgtcatttttatctataacagcattaatatccgcttttaatccatataaattatgagtaatatcaattgatactgaaagatcaacatattttttatgtttatctatagcatttaaaaaatctttttttgtaattattccttgtgtacttctacattttgcacatattcggagcaaactattttccaaatcgataaaattaatatcaataatttttaaattttgtaaacacgtggctaatgtgccaataatatatttttctttacttggctctggaacaactataaaatcacttttttctattttaagtaaatcctcatcctctatattttctatttttttcttaatccagatagataatcctgtatcattattttttcttcgatcatttaacccatctataaatcttctaagatcattatttgcatgacttaaataaatacaataattaggttcattagaaggcagcttatgcactacttcctttacctttccaatagcttcaacgtcagacttaacttgtcctgaaataaccctatttttatcttcattcaacactttaaaatcatttttgttttctggttgaactcctacaaaacctggtgtcatatagttttgtaaaaatgcatccaaagttgcatagtcctgatattcaaagcccttagaagcagttactccaccttgtcctttatttggcaatatccatctctcctttatagtatttttatgaaaccattattgttaatttcgacacaacttttttctgttaaaataaatatttgctattttttcattatacataatctttacgtccaaaagcatatcaaaaataccgactatagtttaaattctctcctaaatcccacttaacttcaatcaatctacgatgaggcaccccagaatttcatttagcctagcgcacattatgaagccaagttccttactctgttccaacaactcacgcaaatccttttcagtctttacataagatgcattttcactcaaagcaacaaaatcatcaacaattttcttcaccatctcttgtcactcttcctcattattcatcgccattagtcttccttttaaaaaatctgcttcaactcaggaatctcttcaagtaatctatcacacccattaaccatattctttactattcaatgattgcggtcaaccttactatgaccaaatgtctccaaaacaaaaagccagcatttgcgctggccatctttgattataaaaggttgttcttcaatattatgcaacactacgttactgttaacttaacttttgtgccaatttcaaaatatacttgcgcagatcttccttggtttcaggatggttcaagccatattcaatcgaggtttcgagataaccttccttgttaccaacatcatgccgcttttccttgaacacatgggcaaatcgtcttgttcaatgtatcaattgcatcagtcaactgaacttctccacctcgaccgggcttggtttcagccaaaatatcaaaaatttctggcgttaataaataacgaccaatgatcactagatcacttggtgctttatcaatagctggcttttcaacaaaattcttcacattataaagactgtcgttgaccttgccatctggcgcaatgacaccatactttgaaacttccttgtgtgagaccttcattacagcaatgtagaagcatgagtctgctcatagtcattcatcaactgcttagttaatgggattttatcatccatgcagatcgtcgcctagcattacaacaaatggctcgcctgccacgaaactttttgctcgataaattgcatctcccagaccagccggatggggttgacgagtatagtacaaatttactcccaagtcagtaataccttgagtcagctttagcaattctaactttccagttttttcaagatcttgctctaattctggatttgagtcaaagtggttttcaatgacacgcttattctttccagtaacgatcaaaatatcttcaatcccagattttttagcctcttcaacaataaattgaatggttagtttaacatacaccagatgaaatatttgagatcgaatctatcaagcagcctaagtgttcaattcattattgcaattttcaatttttaatctttactattcaatatttaatttacgtctttaattggtggtattacaaatctattattcatatatgatggcttaaaatctaatttcttaaatttagtatcctctcttgagatcatttctcccatttcattaccagatacattgctattatttccgttaacaaaataatattgtgcatcttcaaacatatcctcttcttttgctcctttactaaactcacagaatcctaattcaccagctgaggttaaaaattttatgatcatattagtcagttttatttttgagctataatcattaggtattataaataattgctcattagacgaaaagcccgaatacgaataagtatctattacattttcgccgcaactatcagtataagtcagttttattgccaaattataaacaacattaggcgatatattaataatttgtattttagaatacttacttccattatcttgtaaaactttttttactatttgcgtatcatgtttacatgctaaagtaacgatttctttgtagttttttatagttgatgcggatttaacatcaaatctaggacgtttttcttcaatatcatttgcctttttaattttattttgatttttaacctgtgcaaaacctgctatcaccgcagcaatagtaccgaagccacctatccattcagcaacactgcctaatacctctccattagcattaatcattgcacctatcaatattccgaatcctaagcaaaaaagtgatactaatatcccatacacatatctatcatctatatttttttccttcttttgcattatttcatattcatccttttctcttttcctaggcatttcaataaatatcggttttgaaaaaatgtttccctcagagtcattatatataacaagtaaactatattcattgccaactaattttacttttcgaaactgtcaaatcttttgtgtaaatagatctttctcgtaaattgattttttaattatttatttaatcaaagtaggattctaaggtgtcctgaacctgaccaaagcctttatgaattcgattgaaataacggtcattgtagctcattgcctgaatgccaataaaagcatcaagcgactgttcagttggaaactctgccttaggcttagctttgcgcttgatcacattgttaaatgattcaatcatgttagtcgaataaattgaagctctgatctgcttgggatagttataaaagaccagcagatctggttctatgtctttcaagcttctgataacatggctgtaaaccttgccccatttggtatagaagtcatgcaggacagctgtggcttcttctttgtttgtctgttgatgcacctgtttgaattcgttcatgatcttttcacgatcgtcgacgcgtactttagcgcagatattgcgcatgacatgaaccaaacagcgttgaaaatgagctttaggataagtcctggccaaggctgttttcatgccaacaacaccatcagaaagaaaaagctcaacttgctttaagcctcgggatttcatgttttgaagcatatctgtccagacttcaatgttctcgctaggtgcaatgcagtagtcaatgacctccttgtgcccattaggcttgatgccaatggcaatatagactgcttcacgctcaaatgtttctcggcgcaaaggaaggtatgtcgcatccaaatagacgcagaaaaacttgtcgcttagcttgcgtttgtggtaagcctcaacctttggaatcatctgcttggaaatatttgatacctgagctggactgtaatggctgccatacatcttttcaattagatcggctatttccctggtggtcacgcccttggagtaaagcttgataatcatgctttccaagatatccgagtgctgcttgtagtcaggcagcgtgtgctgatgaaattgaccgttgcgatcccgaggcacttgcacttcaattgggccaaattgcgtatcaactttgcggaaataagcaccatttctagagttgccagtattccagccatttctggcatagggatcatagcccagaaaggcggtcaattcagcttctaacaagttattaacagcctgttgtagctctttgcgcaataaatcatttattttgtctggattgaatagagcttgagcaaaatctttggtaaaatcattcatgaaggagttcttctttctgtatgtgtttttttgttcaaaccaatcatacgagaaaggaactcctttttctaatgtttaaagaaataaatttaaggaatcattcatccttacacaaactattttacagtctctacttttctactttttaaagctgttaaaatatctttaattcttatattatattctctacccaatgaatatggcttcacttgttcaggtactgaagctatagaaactttctctcttgacctggtcttatgaattggcataaaaacaatattatcttttggtacatcataagaatgcaatttattttcgtcattttgtaagcaaaagcctctaaattggattacttcttcagtattaccattccaaagagctgttagtttaaactcatcttttgaagagaaaacaattttttcagaattattaattacatttttagtaagtattttcacatctacaattggttcatgggataatctatttaaaactggtattaaagcaaagctcaataaacttattagaccatgatacattactgttgttctgggagaagaagatttatcagcagttaaaagcaaaaaactaaaaatactggctgctattattatacatgcactcattatattcactaattttgcaggatatctatttataaaaacagctaattttaccctataatctgataaaaagcacatacttaccattaaaacgacaatgataaaaatatatatcatatatccaggcgcctcaatttcagaagttaaaaataaatatacgttaattaaaatagctgtatatacagttgatatagctactataagtccattaactttattttgaaaaaagcttttcattcctgttctccaaaaaaatagccagctcatcagctgactacaaacttactttcccaacttctcccgaatcaacttcttagcctcatccacaataggcgctcttagcagcatcaccataacaccgacaacaccaacaataacttcgagtcccatcattagccaagaatctttcaagtgtgtattcatccaaaaaactggcaaaaacattactacaccagagaccaaatacttccataggctgttaaatagagtcctatagctcaacaaaccacgaaccgcaatcagttgatacaaagtaacactaatttcggacaaaacagttgaccacatggcaccattcaaaccataaaagtgaatcaacgggaaatttaaaattatgtttactacggcacccactgtaacagaaattgtaaattgcttctgatggtgaattggtaataggtactgcacgccaagtgcgttactccaagcaatcatcaaaatcacgatagactcaatcatcattgctggacctactggaccatagccgggaccataatattttggagctaatgttaaggagattgctgccaagccaaacatcattggtacagccatagccgatacaaaatcaaaagacttatacaacatctgatttaccttcttcatgtcaccatgtgataccgcattggctacatgtggcaacatgactgtaccagttgctgtcactaaagccaaaatcaacttcactaagctatcagaatattgatagtaaccagatgctgtttcattaaccatgacgcccaacatcgtacgattcaattgtacataaacttgagtagctatttgcggtatgaaaagctcaaccattggtaaaaagtgaatccaaggatttaaactcctaatcttaaccttaggcaaatctcgataaatatccggccacaaagttaagttacctagtagagttgacaatgccaatactacaatatataaagttacatcatagggtcccttgataaaaacgaagatcgctatcattgatacaatctttaccagtgagttctttaaaaccgttactttaaagttttcaacaccttcataaaaccaagaaatgtcaaaagccacagcaattagattaagcgactgagccaacatataatcaaactgtcgagtataaaaaataaggaagatttcaaaagcaataattgatacaagagtcattattgttttaactatttgaatctcccaaaaagttttggccattttagttcgattatctcgaacataggctatttgccgattcccataataaccaattcccatactagcaaataagataaagtattgaataatggaatttgtaaaagcattagcacctacaccttcaggtcgtaatacacgactgacatatgccgatgtaataagcggaactattattgctaatacttgataacctacattatagagataatttcgaatgaccttcatttaaaacctattcaccaaattcattatttaccgcatcgagtgcagcatcaattacctgatccatattgtaatacttgtattgaccaagacgaccaccaaagattaccttgtcttgtttctttgctaattcagcatatttagcgtacaaactattatttctatcattattcactgggtaatatggctcgtctccacgcttccaatccgctggatattcccgggtaataatcgtcttatctggatcacccttaccgaattcaaaatgcttgtgttcaattatacgagtgtaggggatttcagcttcagtatagttgatcactgcgttgccttgatagttgccaacattcttttcttcagtttcaaaacgaagtgaacgatattcaagttcacctaatttatagtcaaagaacttatcaatcataccggtgtagacaactttatcatagttattaagatactcttctttatcatcaaaaaaatcagtatttaatttaacttcaatatttggatgatcaagcatcttttccaccatttttgtgtaaccaccaataggaataccttggtaatcatcattgaagtaattgttatcgtaaatcaaacgcactggaagacgcttgataataaaagcaggcaattcagtacatggtctgccccactgcttttctgtataacccttgatcaacttttcatagatgtcacgtccaattaaagaaatagcttgttcctcaaggttttgtggttccttgcctgccatttcttgtcgttgttcattgatcttagccatagcttcttgcggagtccctactccccacatctcgctaaaagtattcatattaaatggcagattatacatacgtcctttatagttggcaacaggactattagtataacgattaaattcagcaaattgttgtacataattccaaacttctttgtttgaagtatgaaaaatgtgagcaccatattgatgaacctgaatcccatctacttctttagtataaatattacctgcaatatgatctcttttttcaattactgtaactttgtttccacgttttgctacttcatgagcaaatactgctccaaaaagaccagaaccaattattagataattattttccatcactattcaaaaaatctctttcaataaaatttctaaaatgtccagaccaagctttccaactggtaagactaaaataaacatttctactttcatcagaaagtctttcaaattctttatttctatatgctttttcaatacacttaccaaaatccccctctccgcgacaatggcagtgtatatccatttttatcatttttaaacaaaacattttgacttccgtatggcatccattttggatttacaggagcaatataacctacttttctacttttctatttttttagagtaacatacatttttgcagtaaagttagctgtttttctattcataaagaatttaaaaaacgttttttttatcatgctattttcaaaataagggactgtatttatctctatatcttgtaattcgtaaactgctgacattatattactccaatacttattattaaaaccattaatagacaccctcttatattctgccaatataagtcgtagttgcatataaagtctatacattaaaaaatcgacattattatcgacattattatcgacattattattgttgattatttcaaaagtttttttccacacggttaaataagaaactgtcaaatcttttgtgtaaatagttctttctcgtaaattgattttttaattatttatttaatcaaagtaggattctaaggtgtcctgaacctgaccaaagcctttatgaattcgattgaaataacggtcattgtagctcattgcctgaatgccaataaaagcatcaagcgactgttcagttggaaactctgccttaggcttagctttgcgcttgatcacattgttaaatgattcaatcatgttagtcgaataaattgaagctctgatctgcttgggatagttataaaagaccagcagatctggttctatgtctttcaagcttctgataacatggctgtaaaccttgccccatttggtatagaagtcatgcaggacagctgtggcttcttctttgtttgtctgttgatgcacctgtttgaattcgttcatgatcttttcacgatcgtcgacgcgtactttagcgcagatattgcgcatgacatgaaccaaacagcgttgaaaatgagctttaggataagtctgagctaaggctgttttcatgccaacaacaccatcagaaagaaaaagctcaacttgctttaagcctcgggatttcatgttttgaagcatatctgtccagacttcaatgttctcgctaggcgcaatgcagtagtcaatgacctccttgtgcccattaggcttgatgccaatggcaatatagactgcttcacgctcaaatgtttctcggcgcaaaggaaggtatgtcgcatccaaatagacgcagaaaaacttgtcgcttagcttgcgtttgtggtaagcctcaacctttggaatcatctgcttggaaatatttgatacctgagctggactgtaatggctgccatacatcttttcaattagatcggctatttccctggtggtcacgcccttggagtaaagcttgataatcatgctttccaagatatccgagtgctgcttgtagtcaggcagcgtgtgctgatgaaattgaccgttgcgatcccgaggcacttgcacttcaattgggccaaattgcgtatcaactttgcggaaataagcaccatttctagagttgccagtattccagccatttctggcatagggatcatagcccagaaaggcagtcaattcagcttctagcaagttattaacagcctgttgtagttctttgcgcaataaatcatttattttgtctggattgaatagagcttgagcaaaatctttggtaaaatcattcatgaaggagttcttctttctgtatgtgtttttttgttcaaaccaatcatacgagaaaggaactcctttttctaatgtttaaagaaataaatttaaggaatcattcatccttacacaaactattttacagtctcttaaataatcattaattatagactttcttatatcagttgctgtatttcctggtctatcttgtaaataaaaagcgagggctttatcataatatgatactttcttcgctctagacaacgcaaccaaatataacaaaaaatccgtataactcacgtgtttagggaaactaacattttttagcaattgggttttataaagttttgcatgcggtgaaacttgaaaaaaagaaacatactaacctagtgttggatcatgaatcgacggattcacgatctggcactttttattttgtctaaaatagaaagtgaagataaagcaaatcaagtcttcagctttttagacacttgatgtcgtaaaagaaacggactgctttaccacctattcttaagtctcttcgaagtctgtgggcacttagatgccgtgtttagaaaattagaattaataggttgataaagaggtttatcttcacagcggaggttatattatggaatcacaaattattttcggtattgatgttagcagtaaatcttccacagtttgtgtggttaatgaccggatcaaacaaggcgaatcttttagaatctctaatgattcctttggctatcaaaaactttatgagcaactgaaccaatatttgataactcctttagttgttttcgaagctactggtgtttattctctaagcctgcaagctttcttagaggattatcatattaagtatttgaagcttaatccgcttaaagcgaaaaagctaatggacaataatttacgccataataaaactgataaggtagatgcttatcgcctggctttaattcaatttaatgccccgcaaaagctgcgtgatccacagcccagagagtatcatgaacttcagaatgccagtcgctattatgaagaacttactaggagtatagttactactaaaaatcaattgcaccgcaacctccaatccactttcccacaaattgaagaaatactgtctcatccatctggcagaatttattgggcgcttgttagtcttttcccacatgctggatatgttctagaaaagaatgagacacaggtaactcaaatgcttaattctatttctggaataggacaacaaagggcacggtacttaaccacaagattatacgcttttgctagagaagcttatccttatgattccaaagatagtattatcgttagagctattcaaaggaacatttctaatttattttcactccagcaagaacgcgactatgtaattaactacatggaaaagctggctaaagcagtaaacgctcgtgctttatccatctatttgagtatcccaggggttgctagaattacagcagtgagattagtagcagagcttggtgatctaagacggtttagcacttcagctcaaattgatgcgtttgttggcattgatccaggaaggtaccaatctggtgaaaaagacagttctcttggcattaccaagcatggcaatcatattgccagaaaaatactttatcgagttattactcaaatggagacggtaaaggctacgcagccttgccatataactgattattatgacaagaaaaaacgatcttcaaatagacaaggctataagaaaatcgccattgcatcagtccataaactgatacgcacaatgtttgctcttatcaaacatgatcaattatatgattacaacatagccaccgaaaataaaagactttagctgaaatcaaataatcaacttaagtataagcaacctatggaaaaactacaagtattcataggcttatttgtggtactttcgctttttcttaaatttaaactcttatttgctttaaccttattcgcatcattaaaacaagtaaatttattttcttaaatcattgataatacttgactttgggtagaaaaacagctgtatatcctgtgtttctgaatatacttttttaggttcaatactttctaaatatcctggtttcacagaacatttatgagcacttccatcatcagcatacacatcaaatcgatcccctactacaatatcagtgtcattatttttggcaaatgtataaagtacttctaaacaatcttcttccaaccaatcatcaggatcacacaccaaaaagtaatcagaattaatactatttatagctaactctaacgctgaaccatagccaccattttctttatcaattactttaattctattatctttcgcagcacattctttcgcatacttactagaattatctggcgatccatcattaatagccaaaacttcaaaattactgtatgtctgattttctaatgactcaaaacatttttttacgtatttttcaacattatacattggaacaattacggttatgtctgatttcattattttattaccccaaataaattttcttcaacttttcagcagtatttctaatatcgtatccttgtttttttaaaaaatttgtattttctgctcgatcatacttcctggatagtaactttaaactttgcttataccactctttaagcgataaatttaagtcaagaaacatcacgttatcagtaaccttaatatctagaggaacattagtggaagctaataccggaagcccagcatcctgagcctcaatacttgcaattcctagtccttcatattcagaaggaaaaataaataaatccattgcttgtagataatcttcaacattatctacatttcctattaattgaacatatttctctaatcgattttgcttaatactcattcgtattgatttttcctgtggaccagctcctataagtaacagcttagccttagtattatttttaataaaataacttaataattttattaaaaatatttgatttttctcaggtgatagccttccaacatgcccaattagtatttcatgatctgaaatattcaatttgttacgataatgttctctagtcccaatattatatgcatactgctgtatgttaattccatttttcaaaattcttccttttttgttaaaaattttttttgaaaattgccaatatgcagctttttttgttggagcaaccaaaacgtcagcatatttactaaagattggtgcataaatctttttaattacttcatgctttacatttttattttttcctgacatgtgcgaatgcacaataacttttttcacacctgcttttttagcatacaaggtaaataatgcaagtatagatatacttccactatttatatgcacaacatcatattgattatctagcagaatttttttatatgcatttacaacattaaatctattctttccaacattaaaaggtaaattaaaagagtatagcgtagaatttagtgatttaataaagctaatatagtcgggattatcagcataatatggtgttaaaaaatcgaattttagaccttttttgttcatattttcaattgttctaaatacaaaagcctcttgcccgccatacaaaattggctcaccaaacgcctctaaaatctttttcatactatccaactttctacatttttattttatatactctatagacggattaaaacgtaatccctcaattgttcctttaaatatcatctttaaccttttacgtttattatttttagctttgaacaaaacccttatcatgtgatcatttaaacgtaaaaattcatatccatatccttttagcccttcctttctataaaagaaaaaatcattcctatacaaatatctatatctttctattctttctgggacatctgttgcaatgtttgcaccaacattagtttttgttttatgtacaacaatactattagttacaacataacattcatattttgaggaaattcgtcttgtatattcccaatcatcagtccaaataaagaattccttaattggtaaccctacttttttgataactgaaactggaacaaataaggaaacaaaagaagctaaagtaacaggtatcaattcagatgaaaaatcagacacattttttgttaatgtccttctctgaatattcatcgtacacaaggtattatcggtccacaaagttttactagacaaaaaaccataatcatgatttagttttatatctgccttaagaaactcattcaaagcatttttagttggtatgcaatcatcatccataatccaaacaaaatcataatccttttgagctaccatctttataccatactgaaatccaccagcaccaccaagatttttccccgtattaacatagtttatactgttatcatcaatatattttgcaatataattaactgtaccatctgtactattattatcaataatatatatatctggctttgcggtttgttccaataagcttttaatacattcttttagtaacttttttctattatatgttactacaatagcggcaacttgctgtttcctcataaactttaattctcctttttattcataaagctaactacagaaataaaacttaataaaaatggtactattagaaatctaaatggatcatacatattttgtgacattatactagttaatgcagtagtgcaagttagtaaaaacaaaaacttattttgaacaaatttgactttttttaagcttacatataatcccattacaaatggcgatataaaaatagcaaaacctattattccatattgaaataacatagataatatacctaaatctgattggtttaccatatgtgtatccaatatattaaaataattcccatcgtttgatataccatatccccaccatacacctctttctatccaaagagtttgatatgtatttaatgtcatcattcttatttgagtactagatccatagtctgcatttgaagttgaaaaagtattaaccaatttatttaagtaatttcctctaaaaataattggactaatggctatagctcctaccacatctagagctttacttttaaaagtatcactaacgataagtatgaataccactaaacttaataaataggctatttgttgtgaacgtgagtcatacacaatatatgcatataaaaagcataatactataactgagatattacgtgttttaattacaacacttttttctttgatgattttgaaaagagccataacccatacgtaattatctaaaaaagtacctggtaatctacttactccatttctcgcccaagcaaatcccattacttcaaaataacctggagctacattcatacgtaatttattgtacaaaaaccacgcgctaaatctaaatattaatatagcaacccccatataatatatattattaataaatttcattcttcgtttagcagtcgctagcacctccgtcatcggaaacgttaacaacatatacgcataatatctattatgaattaaagcatctttaattgtgtacccagataaggaaaaactatttagcctatataactgtagcccaaacataaaaataaaaacgcctatataaatagatacatatctgagactgtaaaatagtttgtgtaaggatgaatgattccttaaatttatttctttaaacattagaaaaaggagttcctttctcgtatgattggtttgaacaaaaaaaacacatacagaaagaagaactccttcatgaatgattttaccaaagattttgctcaagctctattcaatccagacaaaataaatgatttattgcgcaaagaactacaacaggctgttaataacttgctagaagctgaattgactgcctttctgggctatgatccctatgccagaaatggctggaatactggcaactctagaaatggtgcttatttccgcaaagttgatacgcaatttggcccaattgaagtgcaagtgcctcgggatcgcaacggtcaatttcatcagcacacgctgcctgactacaagcagcactcggatatcttggaaagcatgattatcaagctttactccaagggcgtgaccaccagggaaatagccgatctaattgaaaagatgtatggcagccattacagtccagctcaggtatcaaatatttccaagcagatgattccaaaggttgaggcttaccacaaacgcaagctaagcgacaagtttttctgcgtctatttggatgcgacataccttcctttgcgccgagaaacgtttgagcgtgaagcagtctatattgccattggcattaaacctaatggacataaggaagtcattgactactgcattgctcctagtgagaacattgaagtctggacagagatgcttcaaaacatgaagtccagaggcttgaagcaagttgaactctttctttctgatggtgttgttggcatgaaaacagccttggccaggacttatcctaaagctcattttcaacgctgtttggttcatgtcatgcgcaatatctgcgctaaagtacgcgtcgacgatcgtgaaaagatcatgaacgaattcaaacaggtgcatcaacagacaaacaaagaagaagccacagctgtcctgcatgacttctataccaaatggggcaaggtttacagccatgttatcagaagcttgaaagacatagaaccagatctgctggtcttttataactatcccaagcagatcagagcttcaatttattcgactaacatgattgaatcatttaacaatgtgatcaagcgcaaagctaagcctaaggcagagtttccaactgaacagtcgcttgatgcttttattggtattcaggcaatgagctacaatgaccgttatttcaatcgaattcataaaggctttggtcaggttcaggacaccttagaatcctactttgattaaataaataattaaaaaatcaatttacgagaaagaactatttacacaaaagatttgacagtttcacatatcttgaaacttttatttctctatttttttgatttacataaataaaatacagtaaaacagatataacaacacctatactaatacttaaagaatttaagtctttaaaaaagttgataaaacctaaatataaaaaaactataaggtaaattgaatattcatacagttttactgttttccatctcatattttttctcataccaaattaaaaatgtgttttcgtttttatacctatttttcgtttaattaaagaaaagcctttctttaaagtattctttccaccaatttgtccccaaggaacttctacataagtaaatgaattggtaccaagccaaacatccattaacaactcagaaatatatccaaatactctcgcttcttgcacagaatattcagaaatattaatgctattttctagcttacttagaacatcaaacatgaagctacaatatgattcaaatgcattccttttcataataaacatattaaacatatgagccccacgctttttcataactttatcaaaagcaggaagataatttggatatacttcagcaattacctttcttgcttcatccaaaggctctttatgatgtgcatgaatgtaatgtgaataattagtttcaatataataatttctttttttaggtaaaattacatcatatttttgtaaaagctgatttactttctcaatactaattacattatctaaagaatatggtcttttctcaaagagtaatcttctatagtgaactaatccaatagcgtcaacatcttttaaattcttccaagcccaataaacagcagttagttcattgtaattaggatttttagaggatatattttcaccatcatcatcacgctgataggaaatacctggtttataattctttactgcgcctactaatactggtaaatatccttcctttttgggcataggaaactctttatgcgcagcaaccaaaatttctattttcaaagactcttctcctgatcaatacgctccattaggatgaataaccaccccaattgtcttaacaatcaacttcaaatcttcccacaaaccggaatggttgatatacacaatatcaagccaaaccatttcgtcaaagtcagcttcactacggcgtgttacctgccacaagccagtacaacctggcataacgagcaaacgttgcttatcgtagtcagtatactcagctacttcagagggtagagggggccgtggaccgactagtgacatatcgccgatcaagacattccacagttgtggcaattcatcaagactatacttgcgaattgtatgtccgatcttcgtaattcttggatcgtccttgatcttgaacattgcgccgtcaatttcgttctgatcttctagttcatcaagcatttgatcagcgttaacgaccattgaacggaacttccacatcttgaacggcttctcatctttaccgattcgttcttgagaataaaatgcaggaccaccatcttcatgtcttatttttattatcaaaaataaaaataacggagatagtaaaattaacccaagtgcgctagctagtatatcaaatatccccttaatcgtgtgatacactggtcgtccgttaacttttgcaggattaacttgtagtttatcatactcctcttaccctctgtttgatttagtctatttgaatacactctcttattaatcttatcacgtttaacgcaacttagaagcaaacttgcatatttgcaccaagcattaaaataaccagaactttttcttctgcttcaatgggtgccaatccatctgaactgggtcgccattgatgatacttctagcattatcttgccactgctgagctagatcttgactgaattcttgactcatctttttataagcttcactcaattgatactgccgtcttggcaagtcgtgtgcgtcgctagcaaaggtgcatccctgccccgtcgcaatcaacttacgcgacatctcttcgattttcttgccaaagattcctgtataagagctagcagtaatttgcaccaagcagccttgttccagcatcccttgcaaaatttccggttccttcaagatgcgactattgcgctctgggtgtacgataatcggcgtcaccccgcgctgcatgatcttgaagatcgtgtcttgcgcataagttggcacgtcctcacttggaaattccaacagcatataagtaccgtcttcatcgcagaacaggatatcatcgttatcaagcgcatcaattaagtcacccgacaagcgaacttcctgccctgggaaaaccgtcaacggcaccttggcctcatctagcttctgttggtagagatcagtcagccagacgatatcatccttatggttagtgtaacgaccattcagtgtatgcggcgtacaaattgcatgcgttacgccatctttgaccgcagccttggctaacttaattgaagtgtcccaattttttgagccatcatcaatgccaggcaagatgtggcagtgaatatcgactaaaaccattattgatcgtcactcttttttctaccgaacaggccctttttcttctcagcgccatatccataaccatagccatacccgtagccgtaaccatagccaccgttttcagctctaatgtcgttcatgacgtagcctagaatccgagctttggcaaattttaacatttgcactgctctagtaatcccagccttttgcgtaacgccttgacgtactactaagactacgccgtcaaggtgactagccaactcttgcgtatcggatacttcaagaacaggagctaagtcaatgataaccatatcataatgtgacttaaccaattcaatgaaggtttccattctgcgtgaaccaatcaattcagctgggtttggtggaatcggaccagaagtcaagattgacaagttatcaattccactttcttcaaccacatcatttaaattgattgcgtcagcttctgaagtaagaacagttgtcaaaccagtattgttcttaacgttgaacgtactgtgcaaagttggacgacgcaagtcggcatcgattagcaaggtcttgcgacctgcttgtgcataggtgatcgctacgttggccgtaacggttgacttaccttcactgatgttagctgaagtaaaagctaaggtactaatttcttcatcaactgccataaagttgatgttagtccggatagttctgaattgttcagataccgcactacgaggatcagcaactgtgattaatttggcaccatgcttaattgtatcgtcggtaccacgcttttttctaaataatgccatttacttctcctctcctatactcgacggcttctacgcttagggccattagaattcttattcttttttctaatgacaaatgatgatgacacatggaagtgtgaaacttgacctaagtcaactaaacctaagttatcagtcaagaatgcatcatccttaactgtagtgtcggacatttcacgaattaagactactgcgaaacttaaaaccaagccaataacaaagccagccaaggtaaagagtttcacattaggtgatgattgattaccatcagttgctggcgcaacgatcgtaacgttgttaatgttcatgatgttaggaatttgatctctgaatgaacgcgctacagcgttagcttcaacctttgccttttcaggtgtatctgcagtagcagaaattgagaagacctgtgattgttgttgagtattaactgaaacgctcttggctaattcgctagtagaaacgctgtaactcttaccgctacgttcaactacttctggttgagcctttcttactaatactcggcgaccctctgcattagtcttgtacttagcaggtttagcctttttaaccactctaactgggttagctaaacgattagaagcatcttgcaaaataacatgactagttacaatatccttataggtagtaaccatttgcatgttggcttgttgagtattatatgccgcattcgggtcattcttgttagccttttggttaaccaagatctgtgcattagaagtatactttggtgaaataataaaattagcgacgccccagccgactaaagccaaaccaacactccagataatcagtgcccagatgtggcgacggcaaatttgtagcaattgagtaagatcaattgtattttcagtttgcttttgctcttgttccatttaccttttcctttaataacgattaacgattcataatatagctagccttgttagcagctaccttaacatgtggcaattctagcgccgttctgatcttatcagaaactcgttgacgctcttctctacttaccacttcaatttccatagtgccaaacttagggttttgcgtttctttacttacaccctgagcatgatcttgagaaagattgttagtggcttttctataatccatagcaatcttgtacatttgattcatagtcaagtcagtctgcatctcgctagaaatggaattcaagaaacttgaattaagcaaagttgaaggtgaaacagacttcttaagcaaggccataattaccaagcggtcacgctcttgtctaccataatcctgacgagggtcaccatgacgaagttgggcaaatgctaaagcctttttaccattcatgtgataagtctggcctttgacaaagctataacccatattgttgaaagttaatggagaagttacatcaatccccccaacttggtcaattgccttcttcaaaccacccatattgatcatgatgtagccgtcaattggaacactgtaatatttatcaagtgtcttaatagtttcactaactccacccaatgtataagctgagttgatcttggttacaccatattgtgggtaatctgggaagattgcatttgagtcacgtggaattgaaacaatgcttgtactattagtcttagggttgattgacatcatcatgatggtatcagttctacccttccagtgacgacccatggcaccagtatctgtacccaataacaggatattaattggctttttctcattcagtaaattatcaagagtacgtcctttattactcttggtagtcttagcaacgggagtgtacatattctgcgtcgtatcacgcaaatttttgtagatcatcccgcaaacaaaaagaccgactacaatgatcacgccaataataatccaaaaaccgcgccagaacttacggtgacgacggtggtgatgatggcgatgacaatgtatcggtttattacttgattctgcgttattttccattctaatcctcttaatcttataatcgttattattatatactcaagaacccattttgaccacccttaaaaggtttacatgcggcaaatacttaaaaggaggctcgttttattgctgttttgggttgctgaaataatatattttggtagatgtctaacatgtaataaaaaatgcatccctcgaaaaatggaatgcattgctgctagattgagtttaaacggaattatttttcatcttactatcgccttgccttaaattgtactcacactgtaccatatttagtaagacctaaataaccaaaaagtattaagaagtacattaaatagaagttggatagcatgttaagtattgaagaatcaatcaaagaatttgaaacatattttcagggtaaaccaaatgaagttgaagtagtatcacgaactataaaacaaaaaagtagacggccacataaaccgcctactttatcctaattgttatgatgatcacttgagttagttaaatcatcatttttagttagatcatctatatttccaactactccaccaaatagtgtaaacacacctattccaccaaaaatactaccagccaccgaatgcctttgcatcaccaaaaaagcagaaatacaaatacatagaattgttactattgatactactatcagagatgtccatgcgagccaacctcttcttttttgactagcaacttctaatctccgtctatgcctactttcttcaacaccattattaaattatttccttagcagcattcggatacaatttttggtatccctcaagaatatcaggaagcggaattggtccactatgcatctcaagataagccattatttcttttttggtttctttaggcatctcagatttttgaatttgatcaagaatctattcatctagcgaatctttatctgactttttctttatatcattttctagctttttacttggcttttgatctgccataagatattattccctttcttaagtcgtcccctatcctttgccaatcactggcaatagctttttcctcagcattactattactagaatatatcaacttgtttaataatttgacataaggcatagctacatttttcgataattttttaaacactaattgaatatcggtaaacataattctcacctcattcataatctctttctttattaaaagtatacttaaaatttgactcgtggtaaagattattcttctacatgcgatccacttctttccttattataagcatctgtaatacaataaacttaacagcaaataacgaggtgtttttatgattgataatcaacctaaaaagacaaaagcttatatcgcgggcgtaaacttaaacgaccaaaacttcgactactacatgaccgagctggccaacttgactgaagccaacaacatggaagtagttgggcaaagctttcaaaatgcagaatcaattgtcgccggaacttacttcggtgtcggcaaaatcaatgaaattagaactatggctcaaggcttaaaagcaaaagttttagtccttaatgacaaattgactcccgtacaaattcgcaacttagaaaaattaaccaaaatgcgagttattgaccgcacggaattaattctggaaatttttgccagccgcgctcgaactaaacaagctaaattacaagtgcaactggcacgtttacaatatgaattgccgcgtctccatccctccgagaacaacttggaccagcagcgtggtggtggcttcgctaaccgtggtgccggtgaaagtaaactagaattgaaccggcggacaattggcaagcaaatttcggctatcaagaaggaattgaaggctgttgccggccaggaagaaatcaaagcggcacgacgcaaccaaagtcgcatccctaaagtcgctctcgttggctacaccaatgccggtaaatcaaccacaatgaacggactattgcgtgaattttctaaagaaggagccgacaaggaagtcttcgttaaaaacatgctttttgctacgctagatacttccgtgcggcggatcaacttgaaagacaactttagcttcattctgtctgacactgtcggtttcatttctaaactgccccacaacttggttgaatccttcaaggctaccctgcaagaaacgcgtgatgctgatttattaatcaacgttgttgacgcctctgacccgaacatggtccaaatgattcggacaacacagaacgttttggatgaaattggcgttaaggaaattccgatgattaccgcctacaacaaggctgataagactgatcgcaattacccacagatcgaaggcgacgacattctttattccgccatcgatccaaaatcgatcaaactactggccaacttgatcaccaagcgcgtttttgccaactataaaaagtttgacttgatcctgccactaagcgcaggcaaggaactggcttacctgcatgatcgcgcccaagttttacgtgaagactaccaagacgatggcgtccacatcgaagcgaacatcgcgcccgacgaccaaggacgctttcgtcaatatttggcctaactcgattaggaaaaaatatgaaaaaacataatctgctgttcctttttgccctcacatttttgttagttcctactaacacgcctgtaatggctgctaaatatagtgctagtgagtcaaaaaaggtgcgcacttttcaaaaaagctatcatcgtttgagccagaagaattacaatcagactacgctctttaccgtgcagccaaattttggtattcctttttcagcaggagtgcttgaccctgattacatcaaaacttcaatggcttatgtcaattattaccgctcattggttggactgcctgatgacgccaattatgctaatgataacgttaacgcacaacttggtgctgcagcgctagcttcagttaacgcggagcaaaatctgcgagcccatggtttacaaggttacgtcaagcctggctatatcagtgatactgactgggatacagcggaaaatactacattgggcaatatcaatttttcagaatcaactagcggaaccacggctggcgagatcgttaccgatctgatacgtgaagataataatattgcaggtaatggcaacatcggtcaccgcggcatgatcctctcgacgcgagccacccgaatgggaatcggcgcagcttatggcaccgaaaacaacgtcttgtattctgttgaacatggactatttgccgatgatattttgcgccagcctgtaaaaagccgaatcgtttatccagctgccggcgtttttccttacgaattagttggtggtaaaacgccatggtcttactcaacaaccgagcgaatttctggtcagccgaaaatttacatcacggatttgaccaccaagaaaaagcggcaagcgacgcaggtgcgcaacttcggcactgctctttatggtgacggctacacaacgacaatcacttaccgacctggcaaaaccaagttgatcagcacgcacaagtaccgtgtgcaaatcggcaaacattatagctacagtttcaaatttttcaggcaaaatagcacattgaaaaataaacagattgtaaagcatcgaaaatgaaatacgttgatatgcaaaacggctcaagcagttgtacatcctgcttgagccgttttagatagtaacaaatattgtagtctgttcaacaatcttcatgtaaaataatactcaggtctattgcagcggttagctaccgctaagacttagtaattttagcatggctacacacccctcaagattttttaagttacggaggtggaagcatgcataattgggtagactggagaagtaggcttacaaatgattgcttgggctattgcgtatgcgataacaaaaaaagctaatcacaaggattagccgaaacaacagtcatcttaagttacgattggagttagcgaccgacactcgctagctccttttcttttattattttaatatgatttagaatttattgcaatgtttagaagtgcttattctacgccaatgacgtaacgcatgatgaatcaatagcttgttgtaccaagcataattgtgcttcatataattataggcggtggcaaagttatccaattgtcccgccgcgataaattgattgcgtgtccaatgccaatcctgagtaggataatacaaaattttcactcggattacccttcctactgtaataattgcccgatcatgatgataacgcgtgcgagcaacattgaggtagctaccaattaaagtattgcgccagtatcgattatgcagataatttttctcccaaagtaaggccttgcgcaataccttagaaatgcagtaccattcgcgtttgccgttaggcaattcaaccaaacaccaaagatattggtgtctcttcgccattcaatccaccccttctaattaatatcggctttaattataccgctactagctattcagttagaaaatcaataatgtcagaaaatattaggtcatgatgtcaaatctattcaactgacatcatttgtcctaagaacgcatttaccgcttgcttaatatactcgctgcaaaggtgagtatactgcgttgaatttctggacatggctctgcttaaacggtcttgatgggtgtcattttaatccttctttaatttttactataattttctccacactgaaaactatggcaaaaaaagtagaatttttcagtctagggaaaacttttatcaatacaaaaaagcaagcgcattaatcgcctgcctaaaagtattccaaattacttctctatagtactctcttagcaattgatggtgtaaagtaactcgataccgtttgcaaaatagtaccttgctctggtgttgctgcatttacatattgattgtttcctacataaattgcaacgtggtatggagctgtcgttgaaccccagaagactaagtcacctggctgcaagttgttcaatgaaacagtttgaccaaccttaacttgatcataagttgttcttggtaagttcacgccagccgctttttggtaaacatattgtactaagccagaacagtcaaatgaatccggaccttctgcaccccagacatagttcttacctatctgttgtttagctagcgcaacaattgaagcggccttactagtagcttgcgttgaagaagtttggttagtattttggctagtcttcttgattgccgtattaacaatttgcttagccttcttcaccttagctatcttttcagccttcttctgagtagccgttttagtagctactgccgctgtcttcttattaacagtagtctttgtctgcttagcttccgttttcttaacagttggtgcttgcgatacttctgctttttctccagcagtaacatctacggtataacgcgcttcaatccattcacgcgttccaaccttgtaccacaagttgcccttcttatcgagtgcagtctcagctacattccagaccgtgccgtccttagcacggtagcccatgaattgaccattctcatagttggtccaaatattcaggctcttacctggtaaatagctaatcttaacttgcttaatcgcagtaaaattagctgcacgaacagttttcattgatgtgattgcggaaacacccgtaacggtcagggctgcagccgctcccactttaaaaaaattatgtttcataattgaatccccttggtagcgaaacaggtgaaaacttttcacctaaaattacccactcttactatgtaacgccttcattattgcatgtcctacctcaagaagcaaattagaacattacaatattacaaaaaagacggatcactggaatccgtcttcattacttactatcttaatttaaaacacgcttagcaacacttgggtagaagtatgaactcaaagtttgcttgattacgccttgacctggtgtagcagcgtggatgtattggttgttaccaacatagatacctacgtgatatggagcacttgcactaccccagaaaagcaaatcacccggttgaagattatccatagaaacggttgatccttgcttaacttgatcataagtagttctacccaacttcacgccagcagcgttagagtaaacatattgtaccaaacctgaacagtcaaaaccgttagttcctgtaccaccccaaacataggacttgcctaattgtgctgaagccaaagtaataactgctgaagcatcaccagttgcttgaactgacttcttagcctttttagctttcttaactgcttgagccttatctgaactagcatcaacagtatattgagctaaaatccattggttatcaccaatttggtaccatgtacggcccttcttatcagtcttggtgtcaaaaacattccaagtagtaccatgttgagcacgttgaccagtaaagtggccaccattgtagttgtcccatatgttaattccataacctgcaatgtagttaatctttactttggtagtagcagcttgaacagtagcattagttgaatctggcttgatgacatttactgcagctacaccggtcagagttaatgcagcagctgcggtaacttttacgaaattgctcttaatattcatcaaattctcctgtatgttttcactatatctataagcattcttagaatttattacttaagctggtaacgaaaatattaattcatcgaaaaatctttaaatttctttaatgtatttaacaaaatctataataatgccccaatgttacagtagtgttacaaaagtaatactgatttaataaatattacgtttccgtcaaaaagaaaaatagctagggagatttccctaactatcttaactagatatcttatttttaggaagactaacgcaattagtcgattacacgcttagctgatgatgggtaaaatgaagctaaggtttgttgcttaacattttgaccaggagctggagcgtgaacaaacttaccgttacctacgtagatacctacatggtagttaccccagaataataagtcacccttcttaagcttcttagttgaaactgaaatggtcttaccaagagtaatttgaccgtaagtagttcttggcaaaattttgttaattgcattcttgtaaacgtagctagttaaacctgagcagtcaaaaccgctaggacctgcagcaccgtaaatgtaaggcttgccgatttgcttcttaacaagcttaacaaccgcattacgctccttagtagtagctgattccttcttaactgaacttgaatcaggattggtagtttcaagatctgaaattgagttgttagtattgatagtagtgcttgaaacatcatcagcgtgaacagctggaacattgatcattgaaataccggcaaagaatactgataaagctgcggtgtattttactaaagtacgtctaaaattcaaaattaattgtctcctctaaaaattactaaatttgtttttgatttcttaaatcagttgacggtttatataataccgactgaatgttacacgaatgtttcaaaagagctaccatcgcgttaagaaacatgttaaaaaaacagattttatgtaaaaaaaggagaagcaaaatgctagcgaagctttgctacaagggcatcgagcgcgtttttagtttctgttaaattgtcgttaactaagatatgagcgtattgcttcaaatcttcaggtaaagcatttaattcactgccgctaagtctttctttaatcttggatggatcatcgccccgctttaaaaggcgctgttttaactcttctttagtagaagttgtaacataaagaaaataagccttgtcacctagctgtttaatgtaggaataaatgcccttgatatcgacaattaatgaaaccagatcactttttttccaggccagattcaaagcttctcgacttgagccatattgataagagccgtacttaatatgctcaaaaaagtgcagctgggcaaaagtttcatcggtttcaaaatgataagaaacattctgctcctcgcctgatcgcatcggccgcgtggtatgcgttaatacgcgtggaataccatatttttcagttaaatattctgaaacagtcgtcttgccagcaccactaggtcctgcaataagaattatttttttcaaaacctgattctccccacttgaaaatgttgcttttttataatagcattcttgtgttataaaagactaagactttttctcggaaggaagatacacataatgaaaaaagcagacgtaaaagttggtgcaatcgttggtgccaagtcagaagaagaacttaagaagccattccaaggcaaagttgaaaagatctacgaaaattccgcattgcttgcaattacttcatacgatcccgttgacaccactgctatcagcgacttgaacaataagatcgtagttaacttcaagaatttaaagactgctcgcgctgccaagaacagcaagactgcttcaactaatgaagttaagattgaaaaaattgccaagaagaacgacgataaaaaagaagcagacaagaagtaaaatttgacaaaaatagcccgcgcaatgtttacgcgagctatttttttgcctaaaattaggacatcgatacgagaggaaatattttatgaaagaaaaaacgcgaactgttttattttggtttattttaatccagccctttttagacctttattggttctacaacggtaaattagcggaagttttaccatttactctacctacgattatccgaattttagctgtttttgtgattttctgtatgtttttcagtcaaaagcaaaattggcaaaaattagggcaagacaagtggttaattctatatttagccctactaattttgtattcgattattcacttaatccacgtcaaaaactttaacagcattaatcctaatgactacaattattcaaccgtaagcgaaattttttatctcattagaatgcttttacctctgatggtgatcttttttacaaaagaattgaatttcagtcaggagcaattcagacacgttatcgaaggcatcagcggacttttttcatttacaattgtcattaccaatctttttgtcatttcgcttagaagctacgagacaggcccgattagcgctaatatttttgaatggtttgttaaccccaatatcggttactcccatatggcctccaaaggcttcttcaattttgccaacatggtatcagccgtactctttatgctggtgcctctgatgctttacttcatgttcagtcgttttaactggaaaatcgtcactttgaacgtagttcaagctttagcgatgatcgagttaggaaccaaagtggccctcatcggtttaatcggtggcgtgattatcagtattttgctgtatgttttccacttatttattgttaaggatgttaacaaaaacggcaaagccattatcgtggcgcttttaatcgaagcgggcacctttgccatcatcccctttggtccagcaatccagcgctataattatgaaaaatatttggctcagcaatccgatgattctttgacacaggccaagcgagaattaaatgctggcttaaaaaaatatcctcaaggtaaacagcgcaaggaatttttaacgaatttcatcggcaatcattatcaagattacgccttaaataagaagtttgtttttaaaagctacccttataaatacgatcctgaattttggctcaaaatcatgaacgagccaggcaccgctagaatgcaaaatcgacatgtagaaaaagcgatgcttgatcaagttgtgaagactaacaataatcgactcgacaagttcctgggcatttcttacacacgagaaaccaacattttcaaccttgaacgtgatttcactagtcaaatttattcacttggttggatcggcatgctgttgttcattgggccttatgtcattatcctgctctacgctttaattaagtggctaatgaacaaagaaaagcggacttatttgatcagctcaatgttgctttcaatcgcctttatgattttcgcagcattctcgtcaggtaacgtaatggacttcttaacagctagcttcatcctggctttcgttgaaggccgcttgttagctagcgtaaccagaaaagaaaattaaacataaaaaaagttaggtagttgcttgcctaactttttcttagtttttaaacattatttttcttgcttaataaagcttgaatctggcacccgaattaagtagtaccgagttgctaaatgacctgcatgcatcccgattccattttgccaattccgcttgtacttagccgtataaattgccacgtaagcacgttgatactttttatccattttagccaattccttttttacataaggaatcttctccgcattcacgtcaagcgcagtgttaccataagcaatcgaagcatagtcactaccaatcgtgaccttgctgccatcgcgataaaaagtataagtttgtgagccatatctcttcttagcagaattaatcgttacatagcttgaatttcccgcacctgtacgcattatcagtggctcatacttcacgcttgaagtaatgcggtttgcatcttccaggtctggattgtccataaaagtctgattaaacatccaacctgcagctaataaaagtactacaatttccacaatattaagagccatattcggccaactaaagcgtttatgctgtttgataatcatcttaatccgtctttgacggatgttctggacgatgaaaactaaataaagaatgatggcaacccaaatcaggatcccaatgatattccagctgaacatatctcgccctgctatataaaacatagaaacatgcagaagttttcatatttctacatgtcagaaagaaatatattttcctttctttgtcttatttactgctgtcttcatcagtattccgatattccatctggggagtaatcgcattgactaactcttgcagcttaagggcttagccagcccattgtttttattttgttaacgctagtaaatttaatactgcattgtcatcacgatcattgctatagccacattcataacaaatgtattcattatgcttggtgccatgttttttattgccctgcagagtaattttgtctgcaccagttttgacatagccacaattggcacatctttgtgttgatggatatgttttatcagctagaattaattctttgccataccattcacacttgtaagtcaagacttgtctaaacttgccaaatagtgacctttgcatgcctttggaggctacatgggtcatcatcatttgtttgacattcaagtcttcaatgacgatttggtcataattgtttacatgctcagtggtaaatttttgcaaaagatcattctgaatattggctgctttgcgataatcacgctgaagcttggttctcacttgcaggtaattattgctttggcttgccgatttaccgttaactcttctctttttagacaatactctttgataatgcttgattcgcttgtacagtttctgtagttttgctggcaaaacattaatcttgccttcagtgtagttgaaatgcccaacgttgacatcgatggcggtctttttgccagttttagcctttagtccagcctcttcttcataggaaagggcagcgtaataatgtcctctttctctaaagatgctggcaattttaacctcttccatctttaatgcctcgtatgctggaatatcaaaccaagatttaatccctctaggcttatctaatctaagcttgccattaattatcttggcgcgatcagttttaaagccttgacgtggagctttcttagatttgaaatgcggcttgccccaatcaggctgggtcttgtcaaagaagttcttccaagcattagccagatccttgactgctaattgcagacagcgagcagacaaagcaaattgccaatcagccttgttattgactaattcatcccacactcgatgctcattaggactaggattattatccttgtctaaagtccaagcttcatacatgtcttgccaggttgctaaagctagattccagcagtatctgcgatagttacaaagacgttcaagttctctttgcattatcttatttggccttaattcgactacctgagttttgatcatttgtttcacctccaatgcaaacataagtttagcaaaggatgtaacaaaaacaagcgaacaaaatattaaatttttagcagcagttaatttgcttctatgttttgcctttctgaacaaattacctgtatctttttctatattgccattaaattctatatttcagctaaccatttaatcctcctttttttcaattatatggtaaaaaaagcaaaatttgaataggataataattgaatacttagttaaatagtgagaagatcttactagtacattagatttattagggaacattatggtagcaatagctttttattcaattactgggcaaacggaacgttttattaagaaaactcaactttcggcccatcaaatcgacgatgccaaccctaagtatgatatgggaaaatcttatatcttaatcgtaccctcatatcaggacttcatgatggattcagtcgttgattttttaacgtataaagataacaaaaaaaatattatagggattatcggttgtggcaaccgaaactttaacgacctctttgctcaaactgccaaaaagatcacggcaacattgaaagtgcctattttgtatcttttggaatttagtggtactaaccaagatgtcaaaaatgtacgaaaaatcgtacacgatctttctgctggtgagagtactaagcaagtccaaaagcctaaggaattacgtgggaatatcagctttttgagtgattttagagattaaatatgactgaaaaatattacaaagcaattaactggaatgacatggaggaccgggttgacaaatctgcttggtcccgcctgaatgatattatctgggaaccccgtaatgttccagttagagaagataaaaaagaatttttacaattagacaagccggtgcaagatgccttgcttcacgcattcggagcactatctttttcatctggactccaaatgaaaaatgggctagagcaaattaaggtagatgccatcacaccagaggaagcagctgtgctgaatgccttgcaatatttggaatctattgccaataaaggctacagctacgttatcaacgagttgacggactcaaatatagcaaaagacgttattaactgggctgatgacaatccttacctgcaaaagaagattcggattttgaataaaatctaccaaggcggggatgcactacaaaagaaggtagctaacgttatcctagagacagctctctatcattctgccttctacgctccgctttatttattcggacaaggcaaaatggtacgaacagctgaaattgttaagttagctttacgtggcacttcatttagtgggatttatcctggttacaagttccgcttaggctaccaaaaattaggtaaaactgagcaagcagagctaaaagaatggatcgataacttgtacgatgtgctaattgataatgagaagaagcacattgagttaatgtacaagggcactgactggatcgatgatgttacgcactatctctactacagtgtcaacaaggcctacctcaacctaggtttttcagccaagtatcctgacacttctgattcaatcaaccctattattgaaaaaggggtcatcaagaatgcagtgcttgaagacttcttcttctacactaacgatcactcgctgactaagtttaaagaaattaaataattacaaaagtgtctgggaaaaaactaagtctcagatcatgaaaaaagaacgttgaatttttgtttcaacgctctttttgtatacttttagctccagccttgatattattaaatcatcacaaaataaaaaaggtggaaactaacatgtacaagaattatatcacaggtcaaactgctttaacacttaatctagattttgccattccggccaatcatttggctaatgtcatcagctggtttgtagattcaattccagaagatgttttagtaggcaagactgctaaaacgggccgcccagcctatcatccagccatgatgctcaaaatactgctttttgcttactccagaagagttttttctggcagaaagattgagttgatgctggaagaaaatctgccaatgatgatcttggctgaccagcaaaagatttcatatcatactatcaataattttagatcaagcagccatgccaatgaactgattaaaaagagctttatctacttcactaacctgttagaagatgaaggcttaatcaatgaaggtgctgcttttatcgatggtactaagattgaagctgatgctaaccgctatacatttgtctggcgcaaagcggttgaaaagtatcatgaaaagctgaaaggccaggcagttgaactttatgatgaattgattactaaagaagtagtcaaagaaatggaaaaagaaaaagttcaaactagtcaggggctaaaggaattagctcaagaaactgaagcagaaattaacaagctgactaaagagattgagcaggaaaacaaagccattcctggcggttcacctcgaaaagccaagcgacgtggactaaaaaagattctgcaccggctaagaaaagattatgtgccaagaatgcaaaaatatgaagaagccgaagagatctttgccggacgcaacagttattccaaaacagatcatgacgccacctttatgcatatgaaggaagaccacatgaaaaatggtcaattaaagcctggctacaatattcaagcagtcacgaccgatcaatatgtagttgattatgccatctttcctaatccgacagatttcaaaactttggagccggttttggatcaaatgaccgtgttggacaagtttgacaaaatcgtcgccgatgctggctatggcagtgaatacaattattcgatgctggaggaaaaatatccagacaagaagtactttattccctacactatgtatgaaaaagaacagaccaaaaagtataagaatgatccaactaagctaatcaactggtactacaatgaaaaagatgattattacattgatcatcatggcgtcagattcaatttcaaatattacagccagcgcaaggatcgttctactggtcaggtccgtgattttaaggtttatgaggcagacgagttccagctaacgccagaattggaacaattggctaaaacagctagcggccgccagcgccaagttcgctataatcctaactggcaatatttaaaagaaaaagcaaaagaagttctccaaagcgaagaaggcagacacatctatggcatgagaaaatatgatgtagagccagttttcggacatttgaagaacgtatttggcatgcgcagaacgcacctgcgaggtaaagagaaggtcgaaaccgatatcggaattgcctttatgatgatgaatttgaacaaatattgtcaaagaaggtggctgaagggccgatttttattgttaaaaattttaaagagaacaaaaaaacgatcaagattcttaaaaaaggaaatcttgatcgtttttattcatctggaagctagttttttcccagacactttttttacttcttagtagttttcttggttgcctttttagtagcggttttcttttctgcttcctttttttcaggcttcttatattcacgtattgtggttagcttttcaataattgcctccaccagttgatcaacaatcttcgctggatcttgttcgatctctacttcactggctaattgatcaattctaaagcctgaaacattaacgtattcagagcgcgtttcaaagtaaacatttaaaggatattccttaccctcttcaaagaagttagcaactcgtttgtaattgctataaggcaaattgataatatttgtctccaaggcaaaagtagccggccgctgacccgtcactgctagttgcgtttggatcaatgaattatgcttaaaagcagcgataacttccttgaccatcttttcagcatacggcttgattttgctcttcgacttgctaatgtcggcatatttaactgtttcaagatcttgaatataatcttgattttcaattttttcgttgagatcttttaaattaatttccaaaataaactttcctttttcattggttataattacaaaatactacaaaaaaattttttgtcatcctttttaaggattcaattcagtatttttagctttttatttgttaaaatgacactatgaaaaagcaaaaatttgatcttaagtatttatttttactcattcccattacgttaattctcattataggattgatttacctttttaacaaaaataaaatcgataatgaaattaattggatgacaatgaaggaagaacagcggctcaatgtcccgctagaaaatcaactgcccgatctacccaacggctgcgaggttactagcctatcaatgttactgaattactatgacattaaggttaacaaatatgatctcgccgataatattgctcatgttgattctttcaccgacaacggtaaatatcgcggcaaccccaatcaaggctttgtcggccatatgtctgtcgctaatgctggctggtgcgtttatcatgggcctttatttgacgttgcacgtaaatataccagccacatagaagatgcctctggcagcaattttttagcgattctcaagttaatctccgatgggcatcccgtgctgatcattaccacaaccacttttaatcatgttaacaatatgcaaacatgggaaaccaatactggtaaagtcaacgttacaccgtcatcacatgcctgcgtgatcacgggatacaacaagcaaaagaagcttgtctatgttaataatccttacggtattaaaaaccaaccggttaattggcataacttagaattgagttatgaccaacaaggacgccaggcactttacatcaaataacaaaaaagggcaagccacgaaggcttgtccttttaactcaaggcacatgctcaaagcatatgtggacgtttaaactgttcacatcagtgcgtccaacatcagcacttcccgtgcttgccacttaaggcggatgtcctctatctcataaatatacgcatctcgcgttcattaatcgactcgtcagtcagtaattgtactattttttatgtttgatgtacagtctagcacttttaaaatgacgatatttaaatttataaaaaacttcagtacacatagtcgataacatgaaacctaaagcaatagcaccagtaacaattgctactcgtagaagcaaattctctccttgactataatcccccacaactaaagcacgtactgcttgataagcaggcacgcccgggactaacggtactaaggcaggaatattaaagaccgtcactggactttttttaatgcgtgcaaaacacaagcccaaaatacctatcaaaaaggcgccaattaaatttgaaatcattcgcccaaatcccaaattaaagcaagtccaatatgccatccagcccactgtgccactgactcctgacaggtgaagatcgcgatgcggtacattaatagttaatgcaaaacccaccgaagctacataagaaaaaatgacattaataataatttctaaccaaagtggcatttttatactcctatgaatttaagtacaagtgcaactccaccgcctaaagctaaagcggttaacacagcctcgcacattcgcataatccctgataataaatctcccatgaatagatctcgcaaagcattagtaattgccaagcctgggactaaagtcatcagagcgccgatcaaaatattatcagtaatcatttgtggattaaaatgattgaataatactgccaagatccccatgaccattgctgcaattagctctgataaaaaacgaatcttagtatattttttaaactcataatacgaccaaaaaccaacagcccctactaaggcagcacctgggaaatcaacccagtcgtaattatccataaacaaaaccatcaaggtagcagacaatacagcagctcccaatacctggagccacattgggaaagtaggtgcttgtgatactaaagcaatcttttcttttaattcagaaagagtgatttttttaactgcaaattggcgcgacaagtcattaacccggtctactaattccaaattgatgttgcgatcacgaatttgtttcatctgacttagcttgccaccatctaagctcatgaaaacacaggttggcgtcgcaaaaacacgcggatcatcaattccggcattgcgagcaattctgagcattgtatcttctacccgatacatttcgctcccgccttcgatcattagtcggcccgcagttaaacaaatatccattacttcttgataaaattggacatcccgcttctcagacatagttttagcctcagttcatagtttcaatatcgatggtcttgtcgacccaatcaccgcggaaaaagtcacgttcgtgactaacaataatgactccgcctgggaagttaacaatcgcttttctcaaagcatccttggtatcgttatccaagtgattagtaggttcatcaaggaaaagcaaattagctggttcaaactgcatcttagctaattttactttttcctgttccccaccagaaagttcctttagtggactcattgcttgttgtgcagttaagcccatgcgtgccagcgcttgtcgcaattcctttggctttttgcgttcaaattcttcttgtaaatattggagtggagtcatgttgctattaggccaggttagatcttgcttgaagtaagccaactttgcagtaacagataactcatatgaaccataaattggctttaattgccctaacaatgtcttaagcaaggtagtcttaccaattccgttaaaaccagtaatcgccactttttcatccccaccaacagagaaattgaaggctgacttgaccaaagcatggtcgtaaccgatgaccaaatcttgcgtctgtagcaacaaattagaagcagtcgcaacatatggaaattcaaagcgtgccttgcggttgttttttggcggtgtcaaaacatccatccgcgccagctgcttttcccgtgacttagcactcttagcacgtgtacccgccttgttcttgcgaatataggcctcagtcttagcaatcttgcgttgctggttagcataagccttcaagtaggtctcacggttggctgctttttgccgcaaggcttgcttcaacgttcctgtataacgagtaattgtgccaaaatcgatatcgataatgcagttagtgattcggcccaaaaagtcataatcatgactaacgacaataaaggctccagcaaaattgttcaaatagtcaaccagccaatcaatatgtgaaacatcaagatagttagtcggttcgtctaaaaccagaacatctgggctttgcaacaacaactttgctaaaattattttagagcgctgaccaccagataacttagaaacatcgtgatcatagcctaaatcagctagtcctagtcctgaggcgacttgttcaatttcagtatcaatatcataaaaattattttcttctaaataagtctgtaccttgccggctttttctaacagggcttcgtccccgttttcggcatatttggcatacagatcattcaactctttttctttttgaaataattgatcaaaagccgtccgcaaaaagccacggatagtcacaccaggtgccaatttagcatactggtccaaataaccaacatcaattttattttgccaagttacttgaccatcatcgggcaaaatttcacccgttaaaatcttgattaacgttgacttgccaacaccattttgaccagtaacccccatatggtcttctttgttaagcacaaaattggcatcttcatataaagttttatcaataaaactctgacttaaatctttaacagttaataaactcatttttcatcccctattatttagctgattcatgttctttttcataattttggagtgcatcaagaacacgaggccaatagcgcttaggtaagatcagttgcaaacgatcatgataaataggaaaatcacttgcttttagccccgtaatcttagctagctcctgatctgtcagcttatatttataaacaatacgcttaatttcgactgatgcatgtcctctaaaataggataggccgaagaaaaagatagcaaaaacacttgctgtgatgattgctaattgcaaattcatcctgaagctgtgtagacaaataaaaatcacggcaataaaagaaatcacagctgagagtacaccgtaaataactggaaatattgattctttttcttccttttgcataatcttttcctccctaattgagacttagtaactttacgaacttagcagaaatcagccaaatttgcaagattctacgttttcactgatttttttacataagttaagtatacttagcataattaaaattgcacggagaaaaaaggaaaatgaaacaagaaaaacattattatttcacaccaattcatttgcaaattaatgacttagacgtgcaactagttttgccacaagtcgagcaagcagcagaattatatcaagctgttgcctgtgaccgtgaaaatttaggtaagtggctgccgtgggcctacaaaatgaaaagtgcacacgatgaagctaattttattaaacaaattcaagccaaaatgaaacggcagtcaatactcgttttaacaattttagtcaataagcagccaagtggcatgatcgacctgcataatttgattccaaataaaaaagccgagatcggctattggctgtcgagtaaatatcaagggcatggtattgtcacgaagagcgtaacggcgttatgccagcatgcttttagtgagtttaacctacactatattgatctgctagttgctgtcggcaatgacaaaagtgcaaatgtggctaagcgttgtggttttaaattgatgggaattgaaccacagctaattaatgggcctgacggacaaatttttcgtttgattcgagggtaaatatattgtgttcgcttgttatcaaagctaatattagataaaatatttaaacaagtgtttgagcataacactttactataaaaatgaactcaaatataataaaagtgtaaggtgatatgcatcaatgagtagtcggctcatggtcaatctgattctaatgcaggacataagggcctgacgggtagcagggaccaaaattaaacctgatattacatatctaagacgcaatggcttagttggtggcagacaccaaaattaaaccgactttaggagttcacaatttgtggactccttttttacttggaggaaaagagatgaactataaattatttaaatcagttaatttaaaagaattggggcaattacgtcggtacatatccattatttataatagtgctgatttttatgataaacattttgtaaataaaaccatcatttacactactaaaaataataaaattgaactcactgcaagaagagataactttatgcatttatgtggaatttcatatatcgaagggccaagaaaattttttaatgatgctctagatcgaaaagtacagctaaaaaagttcttattaaaaaagatggctctacttttcagaaattacaagttttaaatcaacttaaagaaatgttaggtccacacttaagattaacaggacgtggagcctttacatacctaaaattcgatcattctttacgtacaaataaaacgatcttggctcttgcattattaaataatcaaaattatatggttccaatctctttgctaaatttgaaattcatccatccatttcctaaaggagataagattattaaaatagaatctaaagatctaaatactggtaagattattactcttagatgattcgcagctaaaaccacccagtcaaatctttaataatgaaaaagataaccggcaccaataatgatggcaagaaattcagagtcttaacatcacgaatttttaataaagacaaaccggagcaagcaatcaaaaagccaccaacaatagacaattcagtaactaatggacctgtaaaaaaatcagccgacaaaaattttgctaccaagtaaatgctaccttgccagcaaaataaaaccggaacgaccgctagcatcccccaaccaaagctagcgccaaagaccatcgaagttactaaatccagcatggcattggtaaatagcatagtattgtttcccttaactgccgccatcacgggacccacgattgacaaagcaccaatacagcaaagcaaaatctcagtagctagacctttagctaaattagatttgcctgctttatcaactaagtgattaaaacgaccagcgatattgagcgcggtaccgactactccacctaaagccaagctaacaatgaacaaaactggatagtgacttttaggcatgctgttagtcacattctcccaaccgatgcctaacgctgccagtcccattgcgatgaacaaaacgtcttcataacgcttattcaatcctttctttaccaagcagccaactgtagtaccaaccagcaaagcgcaagtatttacaattgttccgatcatttttctcacctcttagttttattttaccgcagaaaaaaagtatccatctcggatactttttcatatttaccatttaaaatgccaactactactcgatgacgctgaagaactagatgaagatgtgctttcacccgtacctgaaccataaccagaattcgaaccacctgccggcttatcttgattttgatcataaatccgataattggtgaaagcattgggatcatcccacttgatgtgattgttctgatcattcaattcattttgccgcgtttcttcattgttcaaagtttgtgtttgcaaattcaggttcttacgaattttatctgacgtcttttgtagttccttagtagacgccacctgaattgaagaaccatcaatccaagcatcatgcccttgaatgtagccactctttaagctattcatgcagccacgataattgagcgccaaactaagcatatcattgaatgtcagattagttttcacatatttattgaaaatatctaccagcttgcggtaattgccaagcgtattaaccgacattgccttatgtgcaattgcctcaatcacctgacgttgccgcatctgacgaccatagtcaccacgtgggtcttcttttctcattcgaacataagccaccgcgtgccgtccatttaaatgctgcttgcctttgtggaaatcacaccagtcatacgagaagtcaaatggaacttggacatcgacaccaccaactgcgttaaccaggctttttagcgccttcatattaacttctagataataatcaattggcacatttaacattgatgacacagtcttcatacttgattcatgtccaccgatttcataagcagaatttacccgaaacatgaagtatttattttctggatcgcccttaatatctgccaaagtatcacgtggaattgaagtcattgtcgcagaattcttttgtggattagctgttgctaaaatcatagtatcggaattaccacgatcatggcgaccttcaatcccctggtcaacccctagaactaggatagaaattggctgtttattggcaattttagctgaagtagcagtgttgccgccgtttttaccatcaatcacactatggacggtaaaatacatgtgagcagcccatgccatgccaaaacaagcagttaataatactgccacaccaatcaagcgggcaaaaaagttacctgatttgagcgctgatgcatctgcggctaaagcacgattccgatgaagattaagcgatgaacgatgagcgcgataaccttctcttcgttttggattttggtccattcttttgatcgtttcccttcgaatttaatacaagttagtttatttgtatcacttttaatctctcgataaaataaaaatgctaataattaataataacttatttttttgcgaaatataacgcaacaagctaagatgtatagaaaatgaaatattatggaggtaaaaatggcaattccaactagaaacgaagtccctgaagagcttaaatgggacttaacccgtatttttaaaaatgacgatgaatgggagcaagcttatgcagctgcacaagaaaaagtggctaaacttgctgaattaaaaggtacactagctaaatcaggcaagaacctgtacgagagcttaaccaaaatcttagctgttaaacgtgatgtggaaaatatctacgtttacgctaccatgtccagcgatgttgatacttctaattcgcactatctcggctacgtcagccgggtacaaagtttggctaaccagtttgaggctgcaacaagttttattaatcctgaaatcttgagtatccctagtgataagcttgagcaatttaagcaagctgaacctagattaaaggattacgcacactatcttgaaacaattactaacaagcgtcctcatacattacctgctgagcaagaaaaattgatcgccgatgctggggatgctttaagtgtttctgaaaatacctttaacgttttgaccaactccgacatggaatacggttacgttcaagacgatgacggcaatatggaacaattatcagatggcctttattctttgctgatccaatcccaaaatcgtgatgtcagaaaaggtgcttttgatacactttatgccacttatggacagttccaaaattccttggcttcaactttgtctggcgttgtaaaaaagcacaactataacgcacgtgtgcacaagtataattcagctcgtgaagctgctttagccgataatggcgtacccgtagcagtttatgacactttaatccaggaagttgattcacacctagacttacttcaccgttatgttgcgctacgtaaaaagatcttaggcctgaaggatctgcaaatgtgggacatgtatgtgccactaaccggaagaccttctctttcatacaatttcgaagaagcaaaagagacagcaaaaaaggctttggctccacttggtgaagactacttgaagcatgttgactatatttttaataatcgtgtcatcgacccaatagaatctaaaaacaaggtaactggtgcctactccggtggtgcttatgataccgatccttatgagttgctcaactgggaagataacatcgattcactttatactttagtccacgaaactggtcactccgttcactcctggtacactcgcaatactcaaccttacgtttacggcgactatccaatctttgtggctgaaattgcttcaactactaatgaaaatattttgaccgaatatttcttagaccacattaccgatcctaagacgcgggcctttatcttaaattactaccttgattcatttaaaggcactttattccgtcaaactcaatttgccgtgtttgaacaattcttgcacgaagccgatgctaagggagaaccactgaccgctgacactttagacgacgtttacggtcaaattaatcagcattattacggcgatagcgttgaaccaggcggcgatattgcccttgaatggtcacgaattccacacttctactacaatttctatgtgtaccaatatgcgactggctttgcggctgcaacggcattagcaaacaaggtggttcatggaacgcctgctgagagggatgcctaccttggtttccttaaagctggttcaagtgattacccaactgagatcatgaagcgtgctggcgtagacatgactaagcctgactacttagaagatgccttcaagacttttgaaaaacggttgaacgaatttgaaagcttgattgagaaataaataatcgcgctcatataaaaataatcgatatcatttcgtgagatttgatatcgattttttgttgatgatcttgatttattacttggcatatttatcgctcaatatgtataatacgtatataagtattatagtgccagaaaaggtgaaaaatatggctgaaactttatataaaaaggtcgttaaaaatggttcttccttagctatcaatatcccagctaaggaagtaaaagagcaaaatctcaaagtaggcgatattgttgaagtaaaaatcaaaaaatcagaccgtcctaattctgaaaatttaaaagaaatagatggcttaatttctgattactgggatatgttagagtacttaaaggataagtagtcaatgaagatcaattatctaacagaaaaggatattttagtaatcaatgcaagggttattcaaagagaaggtgcaacgggacaaaaacctcacgttagggatgcagaagcccttcattttttagttgttcaacctaagcaaactagttttggacaagaattatatccgtcttttgctgaaaaagctgggattttattaattaaattagttaaaaagcatgtttttgaagatgcaaataaacggactacagcaattgcattcttactatttttacgacgcaattcttatgaactaacctgtgattggcaagatttagcaaatcaaatcttaaagatcgctcaaatagatgacaatgaactaaattaccaagaaatctatcaatgggttaatcaagtaattcatgaaaactaaaaataatcgatatcattttcgccctaatattatattttatatgaaataataaccactttataaaaaaataagggctattaacccttattcataataaatccatcaactatttcctatgtcatactactactcgattgtcctgcataaccagctagtgtagcctgcaagtcatgaataactttaggagcattaaaatttttagcaaattcgtactgttgcaattgataatataatctagaaccgatatataaagcagaatcattattttccgcttgatcaattgttctatccaaaattcttaccaaatttggattatcaattacatctttactaaaacgaactttttctagttcattttttaactttaaagtctcatccttcttaatcattatttacaccaaaggatgcgcaaatggtccatccttctgccatccagtatacataatacgaccaacgctatcccacatttgtgctaaattatcatgacaataatatcggttgcaatatacaccattaccatagtaatggtactttccgcctccgcgcttgtgatgtgtaccgcctaaaacttgacttaattgattttcttttagttcttgaaactttaccattccagacacctccgataaatctttaagcctgcctcacttagtacttctatcaacttacatatataagtctaccaaaacagtagtgttttctaagaaaacgtcagaaactggcaacgttcatatcatattctgttaaaatacataatttgatcaagaatttagtacctgtcgatttaccaatcaaatactccagttacaataccgttagcacccactgctgcatatctttctagtttcagctgaagttcaactatagctttaggtagttcattttcactaaagttttctttcaatttcaaagacaaattagaagcaatcgattgaattgactcatgcttatcagctttcgcaatagcagcttgtaataactcaaccaattcggcatttttcttaacttgaggatctgaaatcactgtattcaatctactcttaaatgcagcttcttctttaagattctttttaaagaacatatttatctccttgtattaaccttgatttttcagaaaatcatacaactcagtagctgtttttcctccacctacccatgcgttagcaatttcaccgtttttaattcgcataacagtgggagtacctggcacttccaagttatcaaaagcataatctgcattatctttactttcatcaatatttaaatagtataattgaccaccaatcagattattaaattcatttaaagtggctgaatattgtcgacaataatagcacgttgggcaaccaatatacaaatatctatcaatattacgcgtggtgctagttaaatcgttttagttaataaaaaagtccaatcttgttagactcgacttgtaaatagtaataatagaaaagagtctgatctgattgaactgccttaagcttaagcgttttagccaccatttacaagttagttttaaagatttagtgataatttgtcggcactggtatcgtttgtatgcaccggctgagtttactcatcggcgaaatattgatcaaattaaaactacggacagtctgattttggctttacttatctggcaagctaagacaggaattgaatcacaaagaagattctgtgaatgtttcaattgtttatcacactcacgttttaatcggcgttcacgtcagctattgcaattgatttatcagatacggcaagaaatgaataaaaaggttgacctgaatggacagttcttgatcattgacagctttccggtacctgtttgccaaccaattcgcaactatcgtgctaaaatttttcgcggttatgccaacattggttataaggccaccaagaaaatttacttctatggtttcaaagttcatgtcattgttagcgatgacggttacattcttgattatgtcgtaacaaaagcatcagttcatgatgccagggagacagttgaactgatggaaaatacccatccatctaattactatcttcttggcgacgaaggctatttaggcaaagaactgcatcaacagctaaaacaaatgggttatgaactttggacaccatatcgtaaaaatatgacaggagctaaaaagcacaatgatcatcaattgatggctattcgcagaacaattgaaagcgacttttcgcttctgacctattacaatgccgagaacaatcgagcacgtagtctgataggctttcaaagccggttggaaattgcaattttagcttataatttggcttattgtctagaacgatttaactagcaccacgcgtataaaaaataaataaatctactattggtgaaattaatccctgtatcgctatcattactttaatccaagaaactttttccaattaaagtgaaacaatgggcgttttgacttattaacaatattattcattgcaaacaaattttgattaaaaaccatattagtaatagcaaatccacctttaacctcaactagctcttcttcattcaactttttcattatttatgcttcctttcaatttaatgcactaacaatttttacactgttaatgttactacgagcgcaactttatgattaaaatcgtcatattctgtaccatttagatcatattctgcattttcaattaaaatgctcctccaccagaaccatttccccaactattcgacttcttcttgaaaaaatagcgtttagattttgatcgtccacccacaatttagacatgaactagatagcttccgcatattttctcttcccttcatttaccattttgttacaaataaaagcataactctatctagcttctcaaaattaagctcatcagattttgcattatcctaatcatattttgctaaaaataatcaatcctctttctcctctggccaaaaaagatcatctaatgtcttatccagcgcctggcaaatcctgatacacaagttaaccgacgggttataatttcccttctcaatcgcagaaatcgtctgtcttgaaacatcaatctgctgcgccaaatcttcttgcgttaaatctttaccgactcgcgcagccttcatttttaaatttttcaatccttatcactttccttatcacgatggagttgaaacaggcttactgctccaataatcaaccaataaatccccataatgttcagcgcactgttaaagtcatcaatatatcctagaatcaagcaaataccaagtaaaatatatagccaactatttgccttaacatgctcttcattaaatgcaaaatatgctccatggactatatcgtaaactgacatcaccgttaatgacaacataataattgcaaagttaacagcaataccatgctttgtataaaaatccgtctgcatgaataaagcagaaattacttctccaacgattaacacaagaaagctatacctgtcaccacgaccacgaatcaattcctgtcgttcatcatactttgccgcacgacgatttcccacgaatacaacgactaagatgaaagtcataactgcaaacaagcttgcaaaagccattaattttaatatttcaaattttgacattttacacatccctttcttttaatagtttgatattaagcccatattttcaaaatgtaaagtatgttttacatttttactaataaatttgtatttataaaaactagcattaacataatcggtatcatttcactagatttgataccgattatttgttaatgatacctatttttcaaaaatttccttgacttcttcttttaatcgtcgtattataatgacaattaaattaataaaagcttagaagagatgagtaattacttaagacttctgcagagagtcggagttggtgcaagccgatgtggttgagagtaatgaatatggtcttggagctagtttaaagagcaagctgttaagtaagcaatttacgagtgacgatcgttaccccgtccgagtattcccaattttgggagcacttagtaaggagttagttgtgaagctaacttgaatttgggtggtaacacgcttaggcgtccctagcatagaaattctatgctaagggcgctttttattttgcttatttaatttttcagaaaggagccagacaatggataaacctatcaaaactacaagttcacaaatcatcatcagtaaaaaggcattcaaccgaatgtgcactattgtctggttgatcttgatcatcatcggacttttcatcgttaaataaaacatcgaagcaaaactaaggagaaaaattatgacagaattacattacgatatcgttggtagctttttaagacctgcagaattaaaaaaggctcgcgcagaatttgaagaaggaaagattaagcaagaagaattaactcatgttgaaaatacagagatcagagaattagttcaaaaagagattgatcatggccttaaaatcgtaactgatggtgaattcagaagaagttattggcatcttgataccttctggggctttgggggtattaaacacactaagcaggcccacggctatttcttccatgatgaagaaactcgtaacgactctgcccaagttgagggaaaaattaaatttactggtaaacatccagatctttcatcatttgaatacttaaaaaaggttgtcgatgaaactggcgctaacgtaattccacggcaaagtattccagctcccgcacaattttacgcagaacttgttcgtggagaagaaaatattgccgcacttaaaaagatttatagttcagaagaagatttactcaccgatatttctaaagcataccgagacttaattttagccttatacgatgcaggatgtcgcgacattaaactcgatgactgtacttggggtatgattgtagataagcgctattggaaaagtcatttacaagatgacttttcactagacgaccttaaaagaaaatacttgaagcttaacaatgatgcaatcaaagatttgccaacagatttgcgaatatcaactcatatttgtcgcggtaactatcactcaacttgggcagcccaaggaggttatggtccagtagcggactatgtttttgctaaggaaaatgttgacgccttttatcttgaatttgacaatgatagatctggcagttttgacccaattgcacaaattcctaacgacaaacttgttgtcttaggtttagtaactagtaaaaaagcagaattagaagatccacaaaaattaatcgctagaattaaagaagctgctgaattccacccactaaatagtctcgctttaagcacacagtgtggcttcgcctcaactgaagaaggcaacacgttaaccgaagatgaccagtggcaaaagatcaagttggttgtcgacactgccaagcaagtttggagctaaatggcaattaactagttaaaataaagataaatagatttagacaaaggagaaaaaaatcatgggaaaagttgaaagttttgaattagatcatactaaagttaaggcaccttacgttcgtttaatcactgttgaaaaaggccaaaaaggtgaccagattagcaacttcgatttgcgtttagttcaacctaataagaacgccattcctactggctgcttgcacacgattgaacaccttttagccggtcttttacgtgaccgcatcgacggctacattgactgttcaccatttggctgtcggactggcttccatcttttagtttggggcaccccatcaactactgaagttgccaaggcacttaaggagtcattagaagaaatccgtgacaacattaaatgggaagacgtaccagggacaacgattgaatcttgtggtaattatcgcgaccactcattattctcagctaagcaatggtcaagagatattttggctgaaggcatttctgatgacccatttgaaagacatgtggttgaataaaatttaaaggtttaactgaaaaatagtaaataattaaaaaagctagcaattcattttagtgaactactagctcttattttttcacttatatcatcccggcaactaagccaactatatacaagaagacacagcagactaccaaatacaaaccgccccacttgaccgtttcttttaggatctcgccttcgtctccctcacgattaattgagccggttgctactgcaatattctgcggtgaaagcatccctgccgtggcccctgtcatgttcgaggctacaacccagtacttacttacgcctaagtccgttgctgcagtatactgcaaattaccaaataaaacattagctgatgtagcagatcctgttaaaaatgttcctagtgcaccaattaacggcgcaaacaatggataaactggtcctaaaaggccaaccaaggccactgctaatgcattcgtcataccagcataaaccattaccttagccaagcctacaatcgcacaaactgtaattgtagttttccatacgctttttatcgattgtcctaatatttgcatcatttttttcaagctgacaccctgaatcgccccaccaattaatgtagctacaaaaattaatgttccaggagaagataaccaactaattgacaatgtatttgggttctttcctgtataaacaacaagattagtggttactttattaagtacatcattgacagctggaactaatgaagaagcaaagatcacgaagataaagaccaaaataaatggtgaacatgccttgagcatttccttagcatttggacgtaaaacatctggctcttcttcatcatcatgccatctagttaataagactgtaatcgcaattgaacacaatgagccaacaattgcaggcaattctgcccctacaaattttgcagctattacctggggaatagccattcccagtcctgacatcaatgtaataaagcctacacctttaattgccttaatgctgccttcagtcaagataactaaaataaatggtaccagtattaccaaaatagataattgcaatgttacgatgaaggatagtttttcttgatgtagacccgtcacttcagctaaagttaaaactggtaatccaattgcaccaaaagccgtcgcagttgtattagcaatcaaactaatgactgacgcgcgaatcggatccaagccaaaggcaatcaatattcctgccgcaattgctaccgcagtcccaaagccagcgattgattctaaaaagccaccaaatccccaagcaataatcaaaacaataatccgcttatcggttgaaatcgtcgccagcatattttgaataatttccataccgccagattctgtagtaacgttatatgcaaataaagccatgacaataacaaacataatcggccaaatgcccatgataatgccttctagcgccccacttgccgtatctagcaccggtactttaaaactaaagactgctaacaccatcgtcaaaattaagccaatgacacaagcgcgtgcagctggcattcgcataactcccagcgaaataatcaaccaaacgatcggcaacaatgcgatcgcaaatctaatccacatcaaaatcctccatcatcaaaagtgttgtactatattatttaatcatgatttgggtaaaaagttaaaataagacacaaaattttagtttaaattacaattttcacaaatttcacttgcaagtttaaccaacaaactatataacaattaatggaaagtaaaatttctcacatcatgtttgaactactccgtggaatagagtagttctttttttgcgtaaaaaaatagccagaccgaattcagcctgacttctgttttttttagcgatgtttaattacgtgaataccataagcgattaagtaaattaccacttcgatcgttgcaataaagaaagttaccggccagttggtgataaagccgagatacagtccagcccacacgccaactaaagcgaaaaacacggaccaactgatcattgctggtattgttttaccaatatagcgcgccgttgaagatggcaatgttaatagaatgaagactagcaatgaaccaacaatctgggcaccgatagcaactgacatagccaaggctaccaagaaagcaataccaacccagccagtatgtacaccatgtgcaacggcaccgatatggtcaaatgagtcaaaattcaagcttcgagctaccaaaataattaatagtaaaactagaattgacaaaaccactagctgaatcacgccttgtttatcaacaccgatgatactaccaaacagaatattagtagcgtaacggctatttgatccagaaatggctaagaacagcacacctagcccaataaacagagctgagatcgcactaactgacgattctttttgatcgctgtgcaaggacaattctcctactccaattgaaccgagcaaggtaaatagtagcatcccccataacggtgcaatgccgataaagacggcaaaagctgctccagcaaagccgatttctgacagtgtgtgagctaaaaaagcataactccgtgctactacatatacaccgaccacgccacaggtaatcgcaatgaatgtactagctaagaaggcataacgcataaattcgtattgaaacattattcgaaatcctccttaaatttatccatctttccttgcctgatcgttcccttatttaaatatagataatcagtcatatactttttagctaaaggaatatcatgagtgacaaacaaaacggtaattttgtgttcacgattcaggtgcttgattaatcccatcaattcttccttagcagccggatctaggctagctgttgcttcatctaagatgatcatattgggatgatcaagtagagcctgcgctaaatatgcacgttgtttttgtccacctgatgcctcacccattcgggtattctgaatcttttctaaatgagtttcttctaactgatgatcaatctgttccttaacctttttggtcttaaacaatggggcgttaagtccaataaatgcacgaatcgacaatggatactccgcatcaatatttctaaactggggtacataacctaacttaacgtctgaatcaaacttaaagttgcccgcagtcggctttaacatccccattaaaatcttaattaaggtggtcttccctgttccattaggtccaagtagtgcagtcattgacccgtcttcaagctgaaaactcaaatcttgaaaaacatctttagtatcaaatctcatcgagagatcatttacttctaaaatcactcttctaccccctccctaagttgctattatttttctattttagccaaattttgataattttctttcatccaagccaagtaagtagtgtggttaggaatagtctcccgcacatttaacactggaatattattttccttagctaattttacaaataacttcacagttgaactgcttgcctgtgtattgttaacaaagaatgcaatcttttttgctttaatttcattattcatttgattaatcatcttaggactcggatcagtaccattctcaattgcttcttcaaagcccttatccccaatcttgtatcctgcttctcttaaagcataatcaaagacaggttcactaacaaagactggcttactatttttcttattagtcttcaccaattgcttaacttgattaatcttagctaaatacttgtcaccattagctttaaaataagctgcatgctttttatcaagcttagataaacgcttaactaggtaattaacatacttggttggcatacttagattgtaccaaatatgcggattatcccccttctttaatcccatcaagtcttcaccaactaagacaggctttttgctaacagaactagctagcttattcatccaagaatcatagcctaagccattagcaacaataatatttgccttggtcaattctttagcatctgccgtagttggttcaaaatcatgaggatcggtactgctattgctaatgattgccttagccgtaccatattttcctacaacatttttagcaatatctgcataaacattggtggtggtaataatcgagacttcacccgaattgctcgtcgaatttgatctattcgagcaagctgaaactaacagcgcaataacgccaattagtcccaaaaaagagattaacttcgtaattttagatttcgcattttgcataaaatatcctccttgtgcaaaataaaaaagcatttaagttagaaaattcagcataaattctaactaaaagttagaataatctagttaattacatatgtcaacatatttttgcatagacaaatagcaccagtctcccataagcctgatgctatcaataatttaagtcataaaattttgctgaattttattaaatgctttgttctaaaattacattattatataaacatatttttatataattgtcaaactaaattaaaattcttccttcacgtgctgacgcaaaacatctaagattttaatcacatgcttatcttctaagctataatagcgctcctgactaacccgctcgctcttaactagcttagcctcttccaaaatacgcaagtgacgcgaaatagctggctgactaacatcaaactgcttaactaaattattaacactacttttttgattatcatttaaataatataagatttgaattcgaatcggatgattcaacgctctagtaatccgaataatttgctcgtccaatttcttcacccattcatactttttaatttattatagcttaaatttaggtataaaaaaacgctacccttcgggtagcgcaaaacataacagagtatcttgatttaagtagagatcatcaagatatttatattataatacgtttttgccaaaatgtattgttttttgattaataaccagaattatttaataataatattcgatattacttatagtattattcgtttgggtcttctttgacattcttcttccagaaactcatgattaaaccagcaacgattgaaccaataatagtagctaggaagtagaataagatgtggcttggaccaccgatgttaccagcaagtggtgatacccaaagaccaccgtgaggagctgggacaccaacgtgccataaaccaactaaagcaccaccaacagctgaaccaatgatacatgatggaattacacgacctgggtcagcagcagcaaatggaatagcaccttcagtaatgaatgagaagcctaatacccagttagaaacacccgcacgacgttcttctacagtgtacttgttcttgaagaatgtagtaccaattgcagtagcaaatggtggaaccataccacccaccattacagcagccatcaagatagcagcagtagctgagtgagggtcgttagcaaatgcacctgaagcgaagacataagcagccttgttgaaaggaccacccatatcgattgacatcattccggcaaggatagtggtcaaaagtaccaagttaccagtacccattccgttcaagaaatgagtaatagcaaagttaatgccactaaagattgggttaatgatgtagaacataattgctgcaataaagagcaatcctaaaattggatagaacagcattggcttcataccttcaacagaacgaggtaatttagcaaatactttcttcaaaccaaccatcaagtaaccagcaataaaaccagcagcaataccgcctaagaagccggctggtgaagttgcgtgagcttgaacgttaacttggaattgaccgttaacaatagaggccatgtaaccaccaacaaaacctggcattaaggctggcaaatcaccgattgattcagcgatataggctgccaaaactggaaccatgaaggcaaatgccaagttaccagcattgtttaaaaagatgaaagcaggagtcttagcgccacccatgtagttttctacgatgaatgagatggccattaagataccaccaccaataacgaatggaagcatgtgactaataccattcatcaagttcttgtagatacctgcccacaaacctggcttctcagttgatgaagattcagttgacttgtcttgagcacttgcacggtaaacatcagccttaccacccataatgtcatcaatcaattcgcctggcttgttaattccatcaacaacaggacggttaactaagtgcttgccgtcaaaacgtggcatatcaactttcttatcagaagcgataataacacctttagcacgcttgatttcatcaggagtcaacttatccttaaccccttctgaaccgttagtttcaattctaacttcgatgccgcgcttcttaccttccttaatcaaggcttcttgagccatgtaagtgtgggcaataccgttaatacatgcagtaacaccaacaatcaatggcttgttgtcgtcatcacttgtaccttgagccttagcagcttccttagccttcttagcttcagctgccttcttgtcttcttcgtcttttttagcttcagccttttcaaaaagatcgataacttcttcaggagtcttagtattcttcaaagcttcaactaaatcaggatcaattaacaaacctgaaagttttgctaatgcttgaaggtgagtattgtcagcaccatctggtgcagtaatcatgaagaataagtgaactggttgaccatcaagtgaattatagtcaattccttccttactcttggcgaataatacgcgtgccttgttaatagatttgttacgtgcgtgaggcatcgcaattccgccaccaataccagtagttgattcgttttcacgtgcccagattgacttaataaaagcatcttcgtcgttaacgatatcagttgctacttcaaggtcagccatttctttaatggcatcttctttgttcttagccttaagctccataatcatggagtcagggcttaaaatatccttgattctcatatttttcccctcgttttttattaagaaatttgctcaactttgatttgtggaagaacagcatcaatttggctcttaactgcaatgtccttagtaaaggcagtagcagcaccacaagccattccaattctgaagccttccttaggatcttgggtcttgtagtaagtaccaacgaagccggcaatcattgaatcacctgcaccaactgagttaacagcagtaccaacagcacccttagcatggtaaacatgatccttggtaagaaggaaaccaccttcaccagccatagaaaccatcacattttgagcacccttatctaaaagcttttgtgcgtattcaagcatcacatcacttgaatcaaaagttacgccaaacaagtctgctaattcatggtggttaggcttaattactagtggcttatatgccaaagtatcaagtaaagcttgtccagtagtatcaacaacaaattctgcacctgcttctttaatagtaggaagcaatgattgatagaaatcagttggaaggcttggagtaagagaaccgctcattactacaatgtcgcccttctttaaatcgtttaaacgatccttaaaagcagtgatttcttggtcggtaatgttaggaccagccgcgttaatttcagtttccttttcagcgtggatcttaacattcacacgagtgttatctgaaatagtaacgaaatcactttcaattctcttttgattcaattgacgaaccaattccttaccagtgaagccacctacgaagccccatgccgtattatcaacatttaattggttaaggatttgagaaacgttaattcccttaccccctgctaaaaatgaatcattgttagttctgttaacttctccgcggttaactttttctaattgaagaacatagtcaagcgctggattaacagttactgtataaatcatcctattttgcctcctctaattcaataccgactggtaatgaccgtttttgacctggttttagttgatcagttaccacaatcacgtcacttgtattggcaaacacagcaaagttacgctcaccgattttactattatcagttaatacataagcgtgtcttgcctgtttgatttcggctgccttaaccgcagcttcctctggatcaggtgtagttagattgccatttttttcaattccattagcaccaacgaagctagctgaaaaattcattgccttaatctgacttaaggcggtctgacctataacagcatgcgtatcgtccttaacttcaccgccaattagaattgtgttaattccgtgatttaaactgcataaagcagtctctacaccattagtaataatcttgacgttagcaacctctgctaaaaatggtaccatctcataagttgttgttcctgcatcaatgaagacattgtcacctggacgaacaaaattctgcacggcatatctagcaatagtgatttttgcgtcatgattcaaactgaagcgaacgttttgtgatacatcacgagaaaaatgtttaactgattgggcaccgccatgaacacgcttaaggatcctatttttttccatctgaattagatctcgacggatagttgattcagatgttgcggttaagtcacataattcacttacgcgacataactcgtgttgattaacatagtcttcgattaagctttggcgctcctgagtcagcatcatttctcacctcgataaatattgtattcgctttctcctccaaaatcaatcatttttcttcaaaaaatgtcatttttatttattatcgttcaataacattcatttatatgcaaaaaagatgccgttttttgattgaaacgacatcttttcttcgtcatttggaattattcttagtcgttttaccctatttgactaagaatccgtaaagatgactaagaaagagaaccaaagatctattaaccttgcaaaagcaaaacacgctgaatcattattgattcagcgcgttttactattaaatatattttgtctagcctctcaagctacgcttaaagttttgccatgggccgacatcatctgtttgcaaaatcaagtttggatagatttttctaatccagataaatgacgctactgtagcggctaaagcaattaaagcagagatagctgcctctaaattagttgcgttacccataattactctagctggcattacaaatgatgatagaaacgggatgtacgataatactttagcaaaaatcgtatccccacctgattgcatattgactgtgaacaagaacccgatcaacatcaatgtagatagtggtcccaccgctttgttggcattctcgcttttagcaaccaaagcgccacagaaagctgcaaagataataaacaataccaagccgattatcgtaaacaccaatccccaagaagccagattgccaattgcttgatcaatcatcggcttatactgtctaaataaatcgctaaagccatcgatgtatggggccgcgcaataaactgccacaaaaccaacaacataaattaacacttgggtgataatttcaccaaaaatacctaaaatcttcccagtgaaataatcgccacctggcatactcgaaaagattacttccattatcttggtacccttctccgtagcgatatcttgtgctgttacttgcgtataagtgatcacaagcatgtacaagataatcagcaaaacccagaaggaaatttgcttaacaggatcattatcaaagctcttcttatcaacatgcttaacttgttgcttaaattgcgctcgcgtagctaaagactgagtctgttttgtcgttagcttggccttacttaaattcaattgttgctgggcggtgtttaggctagttagcagctctgattttagatcactgtccattttttcatcactatagtaagttgcagctaattgattattcttttgttcaattaaaacatagccatcgatatcttcatctttatacgcctttttagccttagcttcagtgctatagttgtcaaagtcttctgactttttaattgcttgctttaaggcagaattagaagtaactaccccgacatagttgtcatcactgccgccagctgataccattccgataacaaatgaaaagaagacgagcagaaacggtgctaaaatcatcagcaaatatgaccaagttttcacttctctacggtaggtttcttttgcgacaagccagatcttattcatgacgcgcacctgctttcattttgaaaatctcgtctaaagttggaggttcctggtcaaaagtctggatatattgaccggccgaaagttggttaaaaatatccttaccatatttttcgtctgcaagaataagcagcttcattccattgttttgcaaaattatatcttttacacctggtaaggctgataattcagtagcacttttgtctgtcctgacaaaaattcgagttaggccaaagctgttcttaatttcatttactgggccattcaagacgatatgcccatcattgatcattacgacgtcatcgcacaattcttccacgttacgcatatcatgatcagaaaaaatgatcgtagcgccttttcttttttcttccaaaatcagctgcttcattagatcaacattaacaggatctagtccactgaatggttcatctaaaataatcaatttaggttgatgaattaaagttgcaatcatctgtactttttgttggttacctttagacaaagacttaatcttatccatggggatccctttaacagccaaacgtgataaccaatcaggcaattcttcttttacctttttagccggcatccctttaaggctagccaaaaacactacctgatctgaaatagttaacttaggcatcaaacttcgctcttcaggcagatagccaatattgtcataatctttagcgttgaaagaatgtccatcaatactaatctggccgtcataatcaacgaatttcaaaatactatgaaagatcgtcgacttacccgacccatttttaccaaccagtccaagaatacgcccatctgacacactgaagctaacatcaaacaaaacctgtgttgacccgaagcttttatttaggtgttctatttttaacataatttttcctcaactttttatctaatggttattagacctagaagtacaccgtcaaagaactgccataaagtatcggttgaaaaaattgtttttacaatatcaactgacccccaattggttactaaagtaatcactacaccagctgaagcaaccactactcctgtaccaataacttgaggggcaagtttcaacactttcttctgccatggaatctttgatgcgaccgttttattaaggactaagcttgcggacatgatgccaccaaacattagaccgaaagccaatccggctccaatcgacataataatttgaaaaggttgaggcgaaccagcagtcttaacatacatcatcacaagagctaatattggtccaacaagtgctccaattcccatgccttcaataattcgtttgttttcacgagcaaatttttcattattcattgttcttacctcaaggaaattttcagctaattaaacaaatccgaaaacttagtcggaatgttgttcttggcgaagtatttcttgaatgcatccccaaaactcaattgatctttttctctattttcaagcaaatcatgaacagctaagaatgctgtaacggcgtaattaacggctaaaatgattaacaaaccgagcacaatataaattaagtacagcattgttctttcctccaattcagcgattatctcccaggaaataatcttttatccttttaaattaatcatatccccatcatttatgtaaaaggtaaaaccgtccaattctgtcatttttcggactgattttgcattttattcttcatcttttttataaactaataaatcccctggttgacaatccaagacttcacagatcttgctcaacgtgtcgaagcgaacgccatgcgcctttcctgtcttcagaatcgacaggttagccggcgttataccaactttctctgccaactcctttgaagacatctttcgcttcaagagcataaaatctagtgtcacttcaatcatctatatcaacctttctaaataatcgagtctgcatcctcctgaaccttcattccgtacttgaataccaagtagactacgtatagtactgctaggaaaagcaaaccagttgtcacaccacttgggtatagtacattattcgaggatttagcgaaccaagtgcggtgagttatgaaaataatgtaatctattattgaaataagggtatatccagcaactgaaattaataatttcttgagtaaattcaaattactatcagcaaagtaaacttcttgcttgatattcttaacaattaatctggcatatcgacagattaaaaaggctgcaacgctcatcatgatcagtgatagcaacacaaccactattgcaccgatatagttatcaactgatacgccttttatacccctaccactttcaaagccagcacgaaaatccggattatgtataccaaataacacaacacctcccataacgatccacataattattcctatcacacaaaatatttggtaaatccaagcaaaaatcgtaagcaaattcaaaattaattttttcatttttctatcctctcaaaatatggatgattctgtatatagcactgccaattacacccgttactccaattactaataatgtaattctaagaacactccatgttccgcctaagttagcaaacactaagattgccatcattatcagcattccaataattgaacctatctgtcttttcttttctggaagcatatctatccctctcttccataaaactatctatctctttctcgtcttttataattattgtattacgataatttataattgcaatacagaaataaaatatttttttgagataataaaaaaatgtgtctgggaaaaaactaagtctcagatcatgaaaaaagaacgttgaatttttgtttcaacgctctttttgtatacttttagctccagccttgatattattaaatcatcacaaaataaaaaaggtggaaactaacatgtacaagaattatatcacaggtcaaactgctttaacacttaatctagattttgccattccggccaatcatttggctaatgtcatcagctggtttgtagattcaattccagaagatgttttagtaggcaagactgctaaaacgggccgcccagcctatcatccagccatgatgctcaaaatactgctttttgcttactccagaagagttttttctggcagaaagattgagttgatgctggaagaaaatctgccaatgatgatcttggctgaccagcaaaagatttcatatcatactatcaataattttagatcaagcagccatgccaatgaactgattaaaaagagctttatctacttcactaacctgttagaagatgaaggcttaatcaatgaaggtgctgcttttatcgatggtactaagattgaagctgatgctaaccgctatacatttgtctggcgcaaagcggttgaaaagtatcatgaaaagctgaaaggccaggcagttgaactttatgatgaattgattactaaagaagtagtcaaagaaatggaaaaagaaaaagttcaaactagtcaggggctaaaggaattagctcaagaaactgaagcagaaattaacaagctgactaaagagattgagcaggaaaacaaagccattcctggcggttcacctcgaaaagccaagcgacgtggactaaaaaagattctgcaccggctaagaaaagattatgtgccaagaatgcaaaaatatgaagaagccgaagagatctttgccggacgcaacagttattccaaaacagatcatgacgccacctttatgcatatgaaggaagaccacatgaaaaatggtcaattaaagcctggctacaatattcaagcagtcacgaccgatcaatatgtagttgattatgccatctttcctaatccgacagatttcaaaactttggagccggttttggatcaaatgaccgtgttggacaagtttgacaaaatcgtcgccgatgctggctatggcagtgaatacaattattcgatgctggaggaaaaatatccagacaagaagtactttattccctacactatgtatgaaaaagaacagaccaaaaagtataagaatgatccaactaagctaatcaactggtactacaatgaaaaagatgattattacattgatcatcatggcgtcagattcaatttcaaatattacagccagcgcaaggatcgttctactggtcaggtccgtgattttaaggtttatgaggcagacgagttccagctaacgccagaattggaacaattggctaaaacagctagcggccgccagcgccaagttcgctataatcctaactggcaatatttaaaagaaaaagcaaaagaagttctccaaagcgaagaaggcagacacatctatggcatgagaaaatatgatgtagagccagttttcggacatttgaagaacgtatttggcatgcgcagaacgcacctgcgaggtaaagagaaggtcgaaaccgatatcggaattgcctttatgatgatgaatttgaacaaatattgtcaaagaaggtggctgaagggccgatttttattgttaaaaattttaaagagaacaaaaaaacgatcaagattcttaaaaaaggaaatcttgatcgtttttattcatctggaagctagttttttcccagacacattatgttttatcttccaagctactgctttttacttttcttcttatagtaagagttcatgaaaatattcataaagataacaaaggctacactttcaactatattccaaaatactgttccaaagcttaatgttttgtactgaaaatagtcccataccaatcctattaacagggccaaaataccagcgatgatacttctgtttctaacttggcgctcggttaaaattttatttttcataatttttaccccattattatcatatcgaaaaataggaaatctattaaccgaattttctattttttaatattatctatgtttatgttttttatgtctattttgtttggcgaaatctttaacagcgccttctacacatccttttatcataccacttccgctagggagcgcatcaatgaaacccgataaacatgatccacctacaccaagccagttagtgccaccacttactttttctaattctttataattcatttctttcatcataaaagttacctccttttttacaaatgtgatacacaagaaactgatccgctaataatacccacattagcaccaaatatagctccacctactgtaccaattggagtaccaaatgcagtgcctgcaatgccatattttagtccatccttcaacgctcccattccaatagctttagcacaatttgtgatttttctacggcgtcttgctttaccaccgttaccaccgaaaacagctgacagttcttcataagttaaagtttcaaatttgttcatgtttttcccctttataaaacttctaattacaattttcataagtgaattaagttttacctctcttcaacttacacactaataatacaaaacaatttaccttcattggcgtataataccgatttagcacgaaacaagatctatttggaaaatatttaccaaatcggccaagttttcgtatattagtaatttacaaaggattcttattaattgttacgctaacttgatattctgttttataaatccgaaaactagtaaaaacatagacacaatgcacttattatgagaatggctaacaaaaaaatcttctcatagccaaggctacaagaagattgccatcacattaatgcataaactgatacgcacgctctttactttaataaaacatgatcaattatacgactataacatagccactcaaaaccaaaaacttgagtcgaaatcaaataatcatttttagcatagtaacctacgaaaaaaatcacaagtttcataggtttctttgcgttatcttctaagtattacgatattttctattggagatatttttagcctattcgcaccagtatttttttcaatacttatctactagttattatctacctctatgaaaagaactttggaaaaacttaggattttccaaataaacgtctcgtttatgattaccacctttcttactgtataaaggtagcatgtgttcagtatcagttagaccaatatcatctacagaacctgacccacctaaaattccgcttaaaagtacttcatctttagaaataatgattcgtttcatctacttttcctccttagttttctttcctaatgaaatgcccaaaactaaactgattaagatactaatcattccaattaattgaccccagatattatccttctcacctgtagatggtaaagactgagtagaaccatttttaatagtgtcattttccaatcgctttaacttagtaattctattttgattgttcttaacggcactataaggcttgctttgcacttttactgaatcaaattgtttattttctttcacacttccgtgtttttcactaactgctgctagaataatattctttttatgcgatttagctgttttcttgaccttagtggctacgattttaggttttactggcttcttcacagttttcttcttagtttcagctctaggagccgcatactcttgattacctgtcgtaactttagtcagatctgcagtagagctagcaacatttgcagcattctcaaatacgctattttcaacaaagtcagtaatagcaacgtcattgctagactgtgtttgatcatcttcagctacagtcacttcaggtatttcattactttcagattcagtagtattatcatccttcggttgatccttaattactgcctgttccactaatttattagctgcatcagaatacaaaaagttatataactcttgtcccgtcttttctccaccgacccatgcactaataatttttccattaataaatctcattgtagttggagtacctggaataccaatttctttgaaggcatactcatgtgctccttcttcagcatcaatattgaaataaagcagcttacctttaacgatttcattgaaatcttttaaatcaggtgaaaattgtcgacagtagtaacatgttggacgaccgatatacataagatgttcttgattatttttctctgctagaagatcttttacttcttgcatttttactctatgaaaatcttttacattgttctcataatcttcaacagatacctcatcttcatcatcttcactatcttcctcatttgcattattaggatcttgattattagtattctgtgactgattattttgatcttcagaagctgctggctcttcttcctgcttattttgagtttgagctgcttcgttcttactactagttttctgctcagattcggaaacatttttatcatcattttctgttttagatactacttcacttttattctcttgagaagtattaccttcatccgcatgcacaatagtactattcatcatcaataatactgctgggctcaacattaacattaatatttttttcttattcatagatcttcctccgtattttttataactaagaaaaatatatcaattatcagctatctttttggttatcagacttattcagtacactttttgaccaaatcagttatcaaaataattggaatttgattctaactaaaaaagagcttttcagctccttttaattttggttaagaattttatccttaaaatattcaaaatatgtactcttacctgtaataatagttgcgttgccttccatcccatatttcaaatttttcttggacttggccttacagattacttcatagacattatttccgcgtagattaatgggatatactccaatttctttcacttttcctactaatctatccattgttccactagcattagctacctgaaaatacagtgtttggcctttttttattgccccaattttattacctgggaaataagtaactacattgaccgttcttttagccttaatcatcggaaacaagtgaactgtattctcctgtttatcatcaagatgaactagccatttttctctatttcttctaacaatttgtccttcatgatagtttctattggcaatattaagtgtattttgtggttctacaattccggtagatgtaactgtactttgtctagttgcaaagaaagaaccgactattaagatcagaactaaaattgccataggaataataatcatagttgaaaaattcttgaatttataggaatagtattcggtactctcatagtctttattattcataacgttgctcctaattctcaactaagttatagtaaaagccatgtttctgcattaatttctcatgacttccttgctcaacaatttgaccatgatctacaaccacaatattgttagtcctttgtgcaattgctaaacgatgagcaataaaaataatcgttttatcttttaatttcattaaattatctactacttttttctctgtaatcgtatcaagcccgctagtggcttcatcaaaaattaaaattttagccggtgacaataatgcacgtgcaatagttagcctttgcttttgcccaccggataaaatcttggcattttcatccatcttggtttcaaactgcagtggtaattgttcgatttcagactcaatttctgctatctgacaggctttcaatatatctttttctgtaatatctggtcgactacctaagagcagattttctttgattgttcctgagaagatgtatggtgtttggggaacatagtttacgtatgaccgtaagacatgcttatctactttagtagaattaaatccattaaaagttaacttgcctttgcttggagagaagaaatcaactaaaagtttgaccatagtagacttacctgagccactcatccctacgattgccaacttatcattgggttcgatttttaaattaatatctttcccggatttaaaattgaagtgcaacactaagtgttaaacaaaaaggccatgaagacctaaacttgaagtgacgaaaaatcaagaaaggaagatcttcatgaccaattcaaattctagcatttctaagcactatcatcaattaaccagcgtacaacgtggacaaattcaagcaatgctggattccggcataacttcccgtactgttatcgctcaagaagttggctgccataagtcgacaatcagtcgcgaaatcaaacgcggaagcgtcctgcaaagagacagcagctatttattgtatgagcactattacgctgatactgcacagatttattatgagaagcgtcgcaaaaactgctatcagcgcaatccattgaagcattatgctgtctttttgagaatgctctccagacgctttaaagctaaatttgatgccaccagcatcgatgagttcgttggtgaattcaaaaggactatgccaggctacccttgtcccagcacaccaaccgtctatcgctatattgatcagggcttgctggacataagcaatattgatctgcctatgaagctcaaaagacgcaggaacaagcgtcatcacagccatggcggtcacgctttgcacaagaagcatcttggcaattccattgaacagcgtcctaaagagattgaagacagaaaagctccgctgcactgggaaggagatctggttaaaggcgtcagacgcaagaatcagcctgctttaatgactttgactgaaagaaccacacgctttgaagtagttatcaagattcctgactatcgggcaagcacatgccaaaggctgcttcaaaaggagattgacagacatcctgcctggtttaaatcaatcacgtttgacaatggctctgagtttgcggatatgaccaagatcaagggctgccagatttactttgctcacccatattctccatgggaaaggggcaccaatgagaactgcaatggtcttttgcgtcaattcttccctaagggcaagagcatgaaagacaagtcaaaagcttatgttcaacaggcaactgatgccattaaccacaaatatcgccgaatcctccaatatcacacagcagaggaactcttcaagcaatatatctcttcataacctaactgttgcacttaatttgacaattcaggaattaatatcttttaatacatcgactccatagccataatgatagtcaacatgatgatattcaatctcacctgctaattgcttggcatccctaatctgagcatctttctggaactcactcttaaccatgtatacttcattcaatcgattttgtgctacattagctgattgtagagttggttgaagattaataatgctctgaagtggatctacaaaatacgatagtaatgcgttgaaggtcattaattgaccaatgctcatctgcccgttcattacaaccttagcccctacccagaggataattacattgagagataactgaatgaaggtctttaaagctgactgcaaagattcagttttactgtaacgaaaagatttcttgaggtaatcgacgaattgactatcaatcttacgataacgtgtttgttcgctatttaaagctttgattgtttcaattccttgaatatcttcaattactgaagaacttaagacagcattactctccatctgatcattattcatcttttcaaatttcttagaaaagctaagaatcaccactgcataaattggcaaagacagtagagtaatcacaaatagagtggaattttgaattgccaaaactattcccatcacaattacaattgaaagatcaagaaataatgaaataactgtactggcgagtgcgtcaataattcgactagcatcagagaaccttgaggtaatttcccctgttctacgagttacgaagaattccattggtaattcaaaaatatggcgaatgtattgtaagttaagatcaatacttaatcgctgacctagaacatccaatagaaaattttgcccgtaagaaaagatagagttgaaaacatatgctatcaataaaccaatagctaggatcgacaaagtttggtatgtaccgctaggaatataagtatcaattaagccttgcaagaagtatgagctacaaatactaatgattgtcatcaaaagagcagccaaaataatattagtgactagtttcttttgtttgaacatgtatggaaatagtgaccacagattttgctttttctctttgagtggctcaaaatcatcatttgggaccataaaaagggcaattcccgtccattcttgagaaaacttttctttagacattttcgttaaaccaacgctaggatccggatcagcaatcactaaataatttttggttgccttaatcacaacataatagtggagtaattcgccttgctttaagacgtgtacgatgaaaggatattgaatgtctgcatcaggatcaaacaaggacatgtcagctttaactgcttcagtttttagattaaatgcttgtgctgttttaactaagcccagagcggtagtcccttctaaattagtgcgggctgaatgacgtaaatgggctaaaaatactctagaatgatattttttaagaatcatagctaagcatgcaactccacaatctgattcgtctacttgtggtacataaattgatttatactgtagtaacatcttttccactcctcatattaagttgaatccattatttcatgattggaaaactaaatgtaaaaaaataccaaatcggttattctcattaccgattcggtattttagttttctaactagattgagctactcaactttaatattttcaaatttatctacaagctttttaaccacggctttatacgatctagaataagttaccatctgaccattatcaaatataataatgcgttccttcgtgtcaattgcactaatgttcttaggatttaccaaagaagattgcgaaacttttgccaagaatgggttttctttatcaatctgagtaatatttgccttatactcaacttctccattctcagtaaccatatgtactttatgctgtgtagtactgtgttcaatgaaaagtatatcgccttcggccactttacatacgcgccgaccaatcttataagtaaagtcacgttgactaaacttaattctgttagataaattatcgaaggcgttacgtaacgtttcttcgatacgttgaataatcttatcagacgacatagacttactaatataatcaattgcaccgatacgacggcgatacgttaatggagcgtacttatcgtacgccgttacgaagatgatctgggcattttcgtcattcttcttgatgaattcagctaaatctacgccattcttagctttagactctcgacttaattcaatatctaagaagtagataccattcttaatatcatttgtgactatgtatcctaccgcttgagcaaaatcgttagcaacaaacgtaacagattcatttaattcagcgtaaccttcattatcatctattaagtcttgaatagatgcattgatattcttagcaatctgattagctaaatctttatcgtcatcgcatacaatgattgggaacttactcatcctcttcaccatcttccgtatcaattgtcatataaaagtcgaaccagccgtcttgaattgtataagaaatagacatatcaggatatttactctcaatttccttaatattagctaatccaagccctttatggtctttcttagtagtaaagccacgttgttgaatttgactagttgagatatttttattttggattttatttctgatttcgaactcaaattcatctgggtcatcagaatagaccattatttggacttcagcacttcgaatatcatgcttttcggcaatcaatgctttactttcctcaattgcattatcgaaagtaatgccaataatacgtactagatcgagttcatctacatggtctggtaaattacggatattatttcgacattcaaaattatatggtatatccaaattatacaattctgttatctttggaataataatgctcttaattgatttaacgtaaatgtgatttaggtctttatatttaagtaaggctttagaatttaggttagtttcagtatatttatctagtttctgaattacttcttgaacgttaccttcttgcgcacttacctttaaagaattaagaatatttttgtaatcatgtctgaaggcgcgaagatcatcttcacttttttcaagataagaagcatattcttcaagctgatgctgctgttgctttaatttttcttgatcctttttatttaaaagtttttcttgtaccatcgtcatttcatgatatataaatatagcaaaaatagtttggataagaatatagagagaaaagaacaaagttaatggtgtaaaagatttgctttgaatatatatgatagagatgctcaccgtagaaacataggtataagctaatatgcctacgaaaattttattattttggtttgctagataattatatatttttccattacctagttttattgcaactatcatcattagtattagtaagaaacgtagtgataattggcctatcaaagtaaatgacataacctgagtgatcatatcagacacaatatcaactaataaatctaatgtgcatactaatattattgaaccaaatagtatttctaatgtattattttttctcaaatataatacaaaaagcaaagtttcgaaactgtcaaatcttttgtgtaaatagttctttctcgtaaattgattttttaattatttatttaatcaaagtaggattctaaggtgtcctgaacctgaccaaagcctttatgaattcgattgaaataacggtcattgtagctcattgcctgaataccaataaaagcatcaagcgactgttcagttggaaactctgccttaggcttagctttgcgcttgatcacattgttaaatgattcaatcatgttagtcgaataaattgaagctctgatctgcttgggatagttataaaagaccagcagatctggttctatgtctttcaagcttctgataacatggctgtaaaccttgccccatttggtatagaagtcatgcaggacagctgtggcttcttctttgtttgtctgttgatgcacctgtttgaattcgttcatgatcttttcacgatcgtcgacgcgtactttagcgcagatattgcgcatgacatgaaccaaacagcgttgaaaatgagctttaggataagtcctggccaaggctgttttcatgccaacaacaccatcagaaagaaagagttcaacttgcttcaagcctctggacttcatgttttgaagcatctctgtccagacttcaatgttctcactaggagcaatgcagtagtcaatgacttccttatgtccattaggtttaatgccaatggcaatatagactgcttcacgctcaaacgtttctcggcgcaaaggaaggtatgtcgcatccaaatagacgcagaaaaacttgtcgcttagcttgcgtttgtggtaagcctcaacctttggaatcatctgcttggaaatatttgatacctgagctggactgtaatggctgccatacatcttttcaattagatcggctatttccctggtggtcacgcccttggagtaaagcttgataatcatgctttccaagatatccgagtgctgcttgtagtcaggcagcgtgtgctgatgaaattgaccgttgcgatcccgaggcacttgcacttcaattgggccaaattgcgtatcaactttgcggaaataagcaccatttctagagttgccagtattccagccatttctggcatagggatcatagcccagaaaggcagtcaattcagcttctagcaagttattaacagcctgttgtagttctttgcgcaataaatcatttattttgtctggattgaatagagcttgagcaaaatctttggtaaaatcattcatgaaggagttcttctttctgtatgtgttttttttgttcaaaccaatcatacgagaaaggaactcctttttctaatgtttaaagaaataaatttaaggaatcattcatccttacacaaactattttacagtctcaaagtttcaagtatatttgtgaagattacgccaatattacctatagacaataacaaccctaaaaaaatattagcaatacacaaaaatagaatctgtctctttttagatcttactcttgatatttaaaaaaacaccatacatctgctaaactagaaaaaacattaagaaaaagaaataagactatcttttccatatattattccaaagttttttactcaagaaattaaaaccaacatgtgccgtgcttccaccaacaaccttagtcaattcttcttccttcaaaacagtctttttaacattttgcttcttcatgatatttcatcctttcatgattttatactcaacttgtttacacctttaatatatcatgtacttttaagtaaattaaaaaagataccaattcagtcatactttcgtaccgatccggtttcatatttcttcaaacgtaaacaactgacaattaattttcttagctaattcctgacagctatccgtaaagccagatttggaaaatagataataatgcttaagtggatacttgaagatttcactatttgtaatcaatttttctaacacactacgagagatcggttcattcttccatttacattcgccgaaatatccatcacgttcatcgtcagagaatcctacaatatctaactcaacttgttgatgtgttctcttatcggttccccaccaattgcccaagtggataaacggattaggaacaattttttcattcatatcctgagaccacatgaagtcttgactgtatttttcaaactcaggtcccatgaaatcagatagacccttttgtacttttacccaagcaagatcagttaagccacgctcaattagatcggtttgcttgccaacaaaggtataccagaagcggaacatcccgtcacagatacgataaacgatatttttgcttttactcttcttttgctcagtaaccggtaactttttctcaacaatacctaaatctatcaaattattcaggtacgtggttagcggaccagtttgtaagtgggcggattgcgcaattttactatgcttagaagcacctgaagctatcgcattgataatcgaattatagttagttggatcgcgtaattcctgttgtaacaagttattaggctcatcaaataagcgacctgatttactcaaaaagtttttcttaatattatccgcaactgacatgctgtctgacatataactcaaatattggggtacaccgccacaaaccgtattgatgataaaagcgtcctctttactgagttttggtaacatttcatgtgcttctgataatttaaatggttcaagctttaaggctaaagtgcgacgaccatatagtggactttggtagcctaagacttgtcgttccataaatgacatcgatgaaccacataaaatcaaaaataggttagtttctttgaattcatgatcaatgtaggattgcaacattgaactaattgtagggtaagccttagccaaataaggaaattcgtcaataactaaaattacacgttgtttttgagctaggtgtgtaatttctttaaagcattcctcaaaatttgcaaatttttcttttccaccctgatctgtatttttaaaaatactaattgcatcagaaaaacgttttagattatcttccgcattttcttcaagtgctacataataaattgactttttatcttttaaaaactcattgatcagtgaagtctttccaattcttcttcgaccatagatcactgtaaattgaaaatcattttcttgatacgcctgattcaattgctctaattcttgatgtctacctacaaacatagcgcactccttttcactacatcgtaatatactacattatattatactataacacgatatagtataacgtaatgtacgtgtattctatttttgtaataaaaatggccgttacttagagaaatagcgaagatcattaaattttaacatgctataataacaatagaacaagaataaaaagttttagcgtgcgcgttgaggtagctcctcaacttagtcattaacgtgtggctctgctttggcaaagcttttttgttatgttaataccctacaaaaaagaccgtgcatccctgcacggtcttttcatcttatcacatctattttctaacgtattcgccgttcttgtacttaaattcaatcttcttgttaggcaattgaaccgtaattctgcgatatacaggaccgaagccgtgcttttcaagcttaactttcacgctaccgtccttgtttaccttaaccttgtacaagttgtattcgcccttttggtacttaaagtcagttccgttatcttgatagtgaacgtacttaccctttttaccaaatagtctaaaggtcatactctcgtctggttcaccagagatgtggctaacttctttaccccatggcaagatagtgttcttcttgataaacagtggcaacttgccaattggtgcatcaaccaaaatcgtggtctttccagcatgttcaacaccattccagaaatcaatccattttccttttggcaaatatacggcacgcttggtttgaccttcttgaacaactggggctgccaaaatgtcctcgcctaccatatattcatcattcaagttatacacctgtggatcattttcataattaaggacaagtggacgcataattggcaaacctgtcttagtttcacgatagaattcatcgtaaagatatggaatgaaacggtaacgcagcttcaagtacttacggtaaattgacaaggttggttcgccaaatatccatggttcttgtgagcgagttcctagagccgcatggtttctgtacaatggactaaacaatgcgccttcgatccaacgagtcaacaattcaggtgttgtgtcagcaccaaagccaccgatatcagtaccggcaaagctgaatccactcatacctaagttacataattgtggaatcatcatttggacatgtgtccataaactttggttgtcaccagtccaaactgtggaaaacttttgcgttcctgcatatgctgcacgcgtaatgacaaatgggcgttttccactgaatttcttcaaaccttcataagttgccttagccatgttatgaccatagacattgtgcatcttcttatgagttgaagcttcttcttcattatggaagacgatattttgtggaatttcacccttgaaggatgcaggttcattcatatcgtcccagatacctgaaacaccaaggtcaactaagtacttgcagttcttagcccaccacttacgtacttctttgcggccaaagtctgggaagactgaatcgccaggccaaacttggtttacataaacagtgccatctggagcctttacgaagtagcccttttcgataccttccttgtagatcttatagtcatcatctttcttaacgccagggtcaataatcgtgattattctgaagcccaatttacgcatcttagctacgaatttctctggtgactcatagttatcttttctccaggtaaatactctgtagccgcgcatataatcgatatccaggtgtaaaacgtcacatggtaagtcatacttacgcaagttttcagcaatcttctcaacttgcttttgactgacactgtagccccaacgtgattgttgatagcccaaagtccacttttgtggcattggtacacgaccagttaaataagtgtagttagtaataacttccttgagtgagtcaccaccgatgatgtagtagtcaatattgccatcaaccgctgagtagtagtaatagtcattactttccttacctaagtcgatgtggttgcgataagtattgtcaaaaaagataccgtaaggatgaccattttttaatcctaataaaattggaatcgacttatacaaacgggtaaagctctctacttgcggatcaggattgtcagtattccaattatcataagcatagtggcgtttgttcaaatagccggttttatcacccaagccataaaattcttcgtcatctgctagtgacttgaccacttcataataatcggcgtcatgctttcccagtaatttatccacatcatggccttcagattcagccagcttcaaatgttcctcatccatctgtcggtcaattggggttcttttccccgataatctacgaccaatggattgccttgttcatcaaagacgtcaattttttcatcatcataagcttttactatcaacttagccgtagctatttcaatatgatcgcctttatttttaactgtaaaatcagttttaatttctttatcgccttcgatagcataagaattgctagcattacctcgatcttgaaagaatcgcataatttccggtgttaacacggtcaaaatcattggtccattctcatagtttaaggtaattttttgtccatctttagtaaaatcagtaagttgattaatcataatttacctctaaaaaatcaaaagttatgtattcgctttcaattttaacacaataagctaatcaattgggtcataccagaaaaaacaccttcagaaatttttgtatttaaatacaaaaaaactgccttacggcagttttatttaatttattccattggaaaaatcttatctggattcaaaacataatttggatcaaaaacatgcttgatctttctcaaaagttcagtgtaatcatgaccatagaaatcctcaaaccaatctttgcaggcataaccaataccatgctcgccagacatatttccatccaaagctttagctgtcttataaagttcggtaatcacataatgactcttttgctcaaactcttcgtcactcattgcatctgagcaaagataaatatgtaaattaccatcgccggcatgaccaaagttaggaattcgcataccaacctcttgttccaattcatcaactctatgcaaaacatcaggaatatgattaattggcacacaaatatcaacttcatccatctttggcgtagacttttgaatagccaaaagcaatgcttcccgacaagtccaaatcttctttgcttcctctgaattagcatctaaaattaccgcatcagctgctttaaacttcttcgttgctgcaagggcaagctttaattccgcatccaattcctctttagttaaagaatcaagccctagaataatgaagccatcgccatttgcaatcgggaatttttcatcgtaatacttttcccagagactaatgacttttctacccataaattcaacggttgttggcactacaccagaagccaaaattgctggtactgatttaattgctttatccaaattaggaaacggaataattgcattgatcgattgtttaggacgtggatataaacgcatggtaacttcagttactacacctaaagtcccttctgagccaatgatcaggtcttttaacgaataacctgatgaggacttaactgccttagcgccaaatttgtaaagtttaccatcagttaaaacaaccttcaattcgcggatatgttctcgagtaacgccatatttaattgctttcaacccaccggcgttagtatccacattaccaccaattgtagcccaatgcattgctggagctggcatataagtaaatggtttattggctaaatattcttcaatatctttcaaccgaatacctgcttgcacagtcatcgttagactttctggctcgtattccaaaaccttattcattttcaccatatccagtgaaatgccaccttcaacggttaaattgccacccattagaccagtcgaattaccacgcggaacgataggaatatgatgatcgcttgcatatttaacaacgttttcgacttcttcattagtttcaggttgaattaccaagtaaggcattgctctaaccgtcttaaattggtcatgatcccaatgaacagttggcttagtaatgaatcgctctggatctgagataaatttactcaaattatctatatctgttgcagttaattttttaaagtccatctttgacacttctttccaaattgaaacatcctatattaactaatgtatccgcttttgtaagcggtgtcaaaaacaagaactgaagatttttttatctaaaaaagcaaatttccatactacctcactttaaaatgcgatagtatcgactttcatttaaataactattacacaaaatatgaaaataaaaaaactgccttacgacagtttctagttaaataaatccgacatcttagttggaatattattgtttttcacaaaatactttttaaaagtaggtaaatctgcattttcttttttcacatacatatcatgtaaagcccaaaatgcagtgattaacaaattaacgcccaagacaattaacataccgattaaaatatatactaagtaaagcattgatctatcccccgctatatcgtcacttgacccagagtcgcatcttcaatgaagtatctgacgaaagcttgattgaagctcatgccctggccgttgtaaacatgccactcttcgcgtttggcacctacagttctaatgattgaaattactgtgcaaattaccaaatatgcgattagcacgttaaaaattattttcattaccagcatgtctacacttcctctctgtactactcaactaatacactaatatttattagtcaatttgtcaacatcttttagtatttacttttttctccccaggtataaaaagccatagatagctggtccgatcactaccgccccagctatagaaactataatcactgcaataaagcgaggcatagcaaaaaattccgagctaaatttcatacaggcccaggccccaaagaaaaaaatcgcccagccaattaaaattgaaattagcatatttaaacctgaaaatttaggtttagagtttttattgttcatcaagttttctctttcataaaaatattgtgccacaaattgaaggtcaataaacaaaagtgacagattcggtcgttttttagacttatttggtaaaaaataagggagattaagtaaaatatggcgcttaatctcccttttgaatcaataattatttgcccataagacctgaaaaagccattcctaaggcagcaccaccacatgcacctgctttagctgatacgggacgagcataactagtaattgcataatgaaacttcatcacatcatgtgacaatttaccctgccagcttaatggatcaagaccaactcgaattaagttgcagacataattagctgattcaccattttctaactcatgctttgcatcaagtaggatttttctttcttctggcttagtatcttcatttactagtaggtcagtaatattacttaatagccattgttttaaatcatctttattttcttgatacatttttatccctctttttcgactttttcattaatatcaggatgcatccctacaaccattttagaatctttcatgttcttcatcgattcatttattttaataaaaaactctgcaagtagcagagctttttacctcattgcagagttacttatacatatacttagcacatgcttttttagaatccataccattacgaatcttcaaagctaattcaatcgatacatccgcaataattgattgtgggtcaatcacattgtaaggatgatctggtgccttttcctgagctaacgacaattctgtacatcccagcaagattacgttgcagccataatcatcatgcattttttgcaagatctggtggtacaatttaccatcaaccattcccttttctttaatatcggaataaatgagcttattaaccatcggttgaatttccggaccacctaattctgcctcacggtgaaccgcatgaatttcatccacatacaaatgatcatagattgacccttcagtcgcaatcaagccaattttcttttcttgtgggtatttttcaataaattgatgcactgctattctcatcatgtgtaaaaatggaatatcagtcaatgcagccaaatcatcataaaaatagtgagcggtattgcatggcatcacatagaagtctggtcccaatttggcttggcccagaacatcgtcacgtaaatcatagaaaaagtttggtttagtatgatctttaatataagccgttctatcaggaatttgtgcatcattaaccaaaatataatttaaataatcttggtccttagctatttttacacggtgattaattaaacgaacgtagctttctgtggcaatagttcccatgccgccaataatactaaagaagtgtttcactattttcacttactttctaaagtgttcttcttgaccttccaactcattaattacctgctgtgcaaccacaatatcagatggatatggggtatttactccgcgaattttttggaaagcgtcagcccccttaccacagattagcacaacatcatctggcgtagccatggcaatcgcatcatgaatggccttcttacgatctaactcaatagtaacgtcgcacttagagtgatctattcctgaatcaatttcttcggcaatactctttggatcttcaaagcctggatcgtctgtagttaaaaatgctttatctgcgtatgcagtcaaactttcactaaaaccgggacgacgtgacacgcctttatcaccaggagctccaacaacaacaataattttaggatcgttgaattcgttacgcataaatctcattaaagccatcattgaggccttattatgagcgtagtcaactacaaccatgccgtgcttctttgttctctcggtttgcatccggcctggaatagtaacatcgcgaatacccttcgcacattgatcatggttaagtccagccaagcctgctccaataattgcggcagtaccatttgactcgttgaaatcacccagcatctttaaagtataatcaccattaattggtaatttacgtgccttatcactagcacaaactaaattgaaccgagtttctttcatatctaattgttcagaagagaatctgaaatcaattggctgcttcaagtctggattttcaaaattatcgcgggcaaacaaataaatactatcggggttggtagtagttgttgcggcagcgtagacttcatcaaagtgtgcagtttcagcgttgataatacatttacgtgagttaacaagcaattgtaatttgcagtgcaaataatctgcaaaattagggtgttcgttaggaccaatatggtctggactaatattcaggaaaaagcctaaatcataagttaaaccgaagacacgatttttcttatatgcttgactagaaacttccattaccaagtgagtcatgccattatcaacagccgttctcatgtctcggaataagtccaaactctctggtgtggtcaagcttgacttaaagctatcttcaggcttaggaccgaccacatcattaactgaagaaatcagagctgtcttaccaccatttgcttgatcaagcatccctttcaaaaagtatgctgatgtagtctttccctttgtaccagtgaaagctacaacaaacaagtcatcttgtggaaaacggaagaaagcagctgacaaaagagccattgccttagaaacatcgcgcacaattaaagcgtgccttccttttccttctggatatggttgttcagctacataacaaatggccccattgtctttagccattgacaaataagttggtctaaagcctgctcccttgcagaagaacaatgtattagtttgaatatcgcgtgagtcataagacacatagtccattttagtagctactgtatcttgcactgcgcttgacttgagcaagtgatgctcttttaagatcaatatacaggtatttaaggaaatactcattaacttttctcctcgttgtatttaaaacatttcagtcaaaattataacacagctagtgtgttggtgacgctttcttcggatcaagtggcaaacgaataataaaactagtccacttttcgtttgattcacagcgaattgtaccatggtgtaaatcaaccacacctttggtgatagataatcccagaccagttccgcctgtcttagtatttcgcgaagtttctacccggtaaaaacgctcaaagattttatttaatgatttcttcggaattggtgccccattattttcaacgcgcaactctacttcacgtttgttgactaaattggctaccaatttaattttagttgcccctgtaccatacttgaaagcattagaaatcaaattattgtaaacgcggaccagcttttccgcatcagccttaatcgttagattctttggccgcgcttcaatctctatttcaatgccatttttttctgcttctaattcaaagccggccgctacctgctccaacattgaataaatatgcaaatcattcagatttaacttagtattggtcgactttaaagtagtatattcaaacagatcgttagccagtgctttcatttgttctgccttagtataggcaatattgacatactttttctgatcttctggcgaagtcactcctgcttttaacaaaccaagataaccaataattgatgttagcggcgttctgatatcgtgcgaaacattagtgatcaattcatccttagattgctcaattgcccgttcttcattaatcgaatttacagtactatcaaccaacgaattaatcgaatccactactcgttgcaattctggtcgtacccgaaaattaatccgatgatcaaaatgaccattagcaatatagtgaagttccaaaataatgtgacgtagctgcatttggtgatagcgtcgaatcaagcgccagtacaaaacaaccaagtcgcccactcccattaagacgatgaatacgttttgccaggaccagagatgatagccacctgcaaaagtgatcgtcttttttagaaagtagattccgttgaccaggctttcatcctgcaaaatagctaagtgaatcagaatgataattgataaatttaataaaaacagaaggacgaccgttacgaccccttctgcaaacaattcgctcttttcggcgccagttagcttgacgcgttcttttttcatcttatgcctcgaccttgtaacctacgccccaaacagtttggatgacatcctcaccatcagtggctttttgaattttatcacgaaggtgtgacacgtgtaccatgacagttttagctgaaacaattgattcttgttgccaaacacgttcaaagatttcatcagctgaaaaaacacggttagggtgactagcaagtaagtataagataccgaattctaaggcagttaattggatagtcttaccatcaatagtcttaacttcatgtgaatcacggttaattaccaatggtcctacttccaaaatatctggtttttcattcttaacttgcttttgacttcttctcaaaagtgaacgtacacgagccattacttcaagtggattgaatggcttagaaacatagtcatcagcaccagtgattaagccttgaatcttgtccatatcaccggttttagcagaaacaataataattggaatatcggagtcttttctaacttccttaattacatcgattcctgacatatttggcatcatcacatccaaaatcatcaaaacgatatctggcgtagtggtcaatttagtaattgcttccttaccactatatgccgcaacaggttcatatccttcatttttaaggtagatacttaatagttctacgatttctttgtcatcatcaacaactaaaattttcacgaggaatgttcccccttcttgtttattattctctgtttttctatctacagtttagcagatatcatatagaatattttacacattttagaaaaatatactgctttcattatcctttttaaacaaaagctaaaaaaatacacgtttctccatcatgaaaaacgtgtattcattctatttactttaccttatcatcatgcaatttagtttcgacataaacgcagacgataaatagcaaagcaaaacagcagatcttaggtgctgttgcataatcaagcatgctagcaaaaccgaataagataccatctggaacaacccaccaggagccgatcgaagaattaaaggtatcactaactgtcgcaaagaatgcaattaaaatcgttaaaacaagtaaaactgaagttaagatcattcccggccgaccaaaatctttaaaaccatgatcccagtagactatcactccaagcagtaccaataagattgataccagccatagactaccctttttcataataaaggccttctttctgcccttatcctaacacgattaagtagcagctgccttgtttaacgcttattgaatttccttcttgccagtgtagagttcatagtagtaacccttttgcttgattaattcatcatggttaccatgttcaataatatgaccatgatcaagtaccaagattaaatctgagttaacaatcgttgacagacggtgagcaataacaaaactagttctaccagtaagcaagttgtccatcccggcttgaaccattttttcagttcgagtatcaatacttgaggtagcttcatcaagaatcattactggctcatcagcaatcattgcccgcgcaattgacaacagctgtatttgcccttgtgaaaggtcgccgccatcaccatcaatcacagtttcataaccgtgatcaaggtcatggataaattcatctgcgtgtgataacttggctgcttgataaacatcgtcatcactggcatctggattaccaaagcggatattgtccataattgtgccagtaaagagatgggtttcctgtaaaacaattgaaagtgattttctcaaatcatcttttttaatgtttttaattggaataccgtcataagtaatcgttcctgaatcaatatcgtagaaacggttaagcatgttagagatggttgtcttacctgcaccggtttcaccaactaaagctaccttcattcccggtttggcattaatggaaatgtcatgcaagatttgatgatctggtacgtagctaaagttaacatgatccaaaataatatgaccacgaacttgaaccttcttggttgagccatctttttgtggtacattccagtaccacttactgccgacttcatcgtttttcttagaaagagtaactgtaccttggtcagcttctgacttttgatcttccaagttgaaaattctttctgcaccagctaaagccattacaatagagtttaattgttgcgaaatttgggcaattggcatactgaattgcttagataactgtaagaatgaaccaatggcaccaagtgaaagcggagcccaactattaattgcagcagcaccaccaacaaaggcgatcaaaacgtaaagcaagttacccatgttacccataattgggaataaaattgtagcgtaagtgttagccttacctgaggcttgacgcaactcatcattatatttgtcaaagccttccttagattgtggctcatggctgaagaccttgatgaccttcaaaccattaagcatttcttcattataaccattgatttggcccagcttcttttgttggacttggaagaagtgacttgatctaaccgttaagtagcgcacaattccaaatgataaagcaaaaataatgaaggagaacacagtcaattgccaactaagtgaaaacatagcaactactacaaataataaactcaaagctgagttagtaaattgtggaattgactgtgaaatcatctgcatcaaggtatcaatatcgttagtataacgcgacatgatatcaccaaattcattttggtcaaagtatgaaattggcaagctttccatgtgaacaaacatttcgttacgtacacgatattgcactttttgagctaaaacacccatcagcatgttaaaaaggtaattagacaaaaaaccaatcgcatagatcccaaacattaccgcaattgcagtagctagagggccatagttaggaactttttctttagttaaaggcacaatataattattgatcaaacgttcaatgaataacgagccaataacgttgctggcagctgctagcacaatagtgatcatggaaacgatgagcatccatggacttgtactattaaccagtttcaataggcgcaataagattttggttctgctaccctttgtttgatttttacttttttccattgcttgatccaaattgctcacctactttccttgttcttcctggaatttagcgattgaactataaagttcgttagtcttcatcaattcatcgtgggttccgatagcttgaatttgaccatgatccatgacgataatccgatcagcatccttaattgaaacaattctttgtgaaataatgattttagtagtttctggcatatctttagccaaagacgttctaatttgtcgctcagtactggtatcaacagctgaagtggagtcatctaagatcaagatcttcggattcttaagcaaggctctggcaatagtaattctttgcttttgcccaccagaaacgttgttaccaccttgttccaccattgtgtcataaccatctggcatttcacgaataaagccatcagcatgggcgattttagcagcggcaattacttgttcatcggttgcattttcgttaccccacttgaggttatccttaatcgttcctgtgaacagcacattcttttgtaaaaccatcgcaacgttatcacgcaaggtcttcaagtcatatgacttaacgttgtgtcctgcaacccgaacggcaccagaagtaacatcataaagacgcggaatcattgaaaccaaggttgacttcgatgaacctgtttcaccaataatcccgattgtttcacctggcctaatgtgcaaattgatatcttttaaagcatcagccttgtccgcaggttcgtacttaaagctaacgtgatcaaagataatttcaccattggtcaaacgtttcaatggcttcttaggatcttcaattgttggttcttccgtaatcactgaccactggcacctgagataaccaattgcgtagtaatcatagctaaaatgtttaaactaaacaaaactgagtttgaataagtaaacattgaaattaattgaccagtttgtaaactaccgccaaccacttcttttgcaccgaaccagcagattgacagcgttgaaatattcaaaacagctgcaactactaatgcgttcaaagacataatcttttgtgcagtcgcaaacaacttgtaaataaagcctgatgacttcttgaattctttaatctgcggttgttcttggacataggtcttaacttcacgaataccacgtacgttttcacgcacaacctggttcattcggtcataccctctaaaaatcttaggaaagtatggataagctgttttaataatcaaacccaaagcaattgcaaaaaccggtcctaaaactgcaaagattaatgataaacgcggactaataataattgacataataattaaaacgatgaacatcattggtgctctaacagcaattctgatgatcatttgatatgccatttgcacgttgttaacgtcagtagtcaaacgtgtaactaaactggcacttgaaaagtgatcaatattttcaaaagaatagtcctgcatatggtagaacatgtcttggcgcaagtttgcggcaaaaccagcagctgcatgagctgagacataactcgcactagcgcctaaaattagcgaaataacggttaacactaatagcaatagccccattttactaatataggacatatcccccttcataattccgttatcaatcaaaattccgaccaaatatggaatcagcatttcaatgataacttcaccaataacaaacattggtgagagcaaagacaattttttatattgcctaattgatttgctcaatgttttgatcatagagacccacccttctattcttttattcaatctcgcaaataaaaagataaatggatcatctccatttatcttttttatctatattaagtttaagtatgtgcttatttttacggaaattcaattaacatgcttgcaaaacaggtaaattatttatgttgttgtggccttggtgcaaatgcggaaccaacaatattgtagtgctttctgaataaataacgtacaccataggcagccgccgcgataacgatgtcagctactgctggtaaaactgggttgattacgcgcaatgctgggatttgcaaaatccacatccagacaaacaaaacaactgctatagccaacattcttaagatcagcttaaccaatgaaggacgtttaccttgctgaggcattagccaatcattgtatttaaccatgaagatccccattaaaatacctacactggcaattgtcagaatccccatttgtgaattatacggttggttcttagtttggaataatgcaaggataccacataaaccaacaaaaattgctaaataaagcaatgcgccatcaaccatcaactgccaagttggtgtagccactggctttttcttaggatgaagcatttgttcagccttaattgctggtgaagccaggtaaagcccattggctggttgcccatgacgttgggcaataataatttcactgagcaagccattagtcatcgcaactgcatcagcacgtgacattgaaccttgtttttgcagttctttttctagacgaaaaacatagtcactgttcttgttactcaacttttcacgcaaagcttttggatcttcctgcttaattttttcatcctgagtatcaagctcagcttgcttctttaatttagcttgtttttcagtgttaatttttgtttgatcttgttctctctttgtctcttcagccattcttactcctagacgttaaatctaaattcaataatgtcaccgtcttgaacttcgtaatctttaccttcaagacgcagcttaccagcttctttaaccttttgcatagtttcaagcttgtctaaatcatcaaatgaaacaacttcagctcgaataaaaccacgctcaaagtctgagtgaataacaccagcaacttgtggagctttcatccctttgtggaaagtccaggcacgggtttcaggaccaccggcagtaaagaaagttctaaggcctaagatatgatatgcagcacgaatcaaacgatccaagcctgattcttctacgccttccatctcaaggaattctttcttttcatcatcagccataccagcgatttcttcttcagttgcagcagaaatacctaagcattctgcaccttcgctttcggcatgcttcttaacaatttggtaatacttgtcgctttctggatcagccattgagtcttcagcaatgttagcaacgtagataactggcttggaagttaacaagaacaagcccttaacaatcttttgttcatcttcgttgaagtcgattgaacgagcagcattaccttcttcaagtactggctgcaatttattcaaaacagccatttcagccttggcttccttatcgccttgttgagcaaccttctttaccttattgattctgcggttaacagcatcgaggtccgcaatagcaagttccaagttaatagtattaatatcttcttctggatcaaccttaccagtaactgaggtaatattgtcatcatcaaaggcacgaacaacgtgaacgatggcatcagtttgacggatgttttcaaggaacttgttaccaagaccttcaccttttgaagcacccttaaccaatccagcaatatcggtaaattcaaaagttgtgtgcacaatcttcttagcaggaatcaattcttgaattcttgccaaacgcttgtcaggaacttcaaccattccgacatttggttcaatggtggcaaatggatagttagccatttcggcaccagccttagtaatcgcattaaacaaagttgacttaccaacgtttggtaaaccaacaataccagcagttaatgacatttgttgtcctctttttctaaaatcaattttttatttttacttacttgtctattttatccaaaatttggccgagcgatacgatcttttggcacatattgctctttttttgcattaaccggatcattcgccttagttaatagcttttttagcttccggttaaactcgctgcgcggcatcatgactatgtgcccacaacccatacattttaatttgatatcagcacccatgcgcaaaatttcccaatcattagtctgacaagcatgaggctttttcatttgaactgtatcagccaaattataaacaatttctttagccatctaaatcaacacctaacaaatcaagaatccggttcaattcttcagtcgaagcaaaatcaatcgataaatgacccttacctttttgtgtttctgaaatattgacgctagagccaaacttattagccaattggctttcgctagcccggataaaggccgatttcttgacggtctttttgctgcgaggttttttagcgttcaattcactgactaccgcttcaaccttacgcaccggcatcccttccttgactactcgcttagccagcgcatcaatcttttccttatctttcaaacttaaaagcgttctagcttgtcccatcgacagttcaccatgttggagtaaacgcttagtcttgctaggtaaagtgagcaaacgcaaataattagcaatatatggtcgcgacttacccatccgcttcgaaacttcttcttgcgttaagccaagattcttctgcagcatttcataagcttgcgcctcttcaagtggagttaaatcttcacgctgcaagttttctagaactgccacttccatcatttggctttcgttaaacttgcgaataattgctggaatagtcatcttcttagccaatttagaagcacggaaacgacgctcaccagcaatgatctcatatccattaactgattcgcgcacgataattggctggaaaacaccattttccttaatagaatccgacagttcttttaagctcttatcatcaaatctttttctaggctgataaggattcggccgaatatcgcccaaatcgagttcttggacttcttctgcctcttgaacttgaggctcatcctcaaataaggcttcaagaccacgacctaggccgcccttttttcttggctctttacttcttgagtctcttgtcatgagcttttaacacctcttttgctaaatcatcatataccttggcaccacgagattttggtgcatattctgtaattggctgaccataacttggggcctcagctaatttagtaattcgaggaatgatggtcttataaactttcttgctaaagtaggactgcacttctttaaccacttcagcacccaagttagttctggcatcaagcattgttaacaaaacgccttctacgccaagatctttattaaaatgcttttggactaaacgaattgtgttcaaaagttggctaagtccttccatagcataatattcactctgaactggaatcaaaattgaatcagatgcagtaaaagcattaattgaaagttgccctaatgatggcggacagtcaataaaaacaaaatcgtattgatcgctaattgcatctaaagctgactttaagcgtgtctcccgagccatcattgaaattaattccgtttcagcaccggacaagttgattgtggctggaaccatatctagctttggcgttgaagtatggtgaatagtatcttgaataggaatttcgtcaatcaaaacattgtaaatgtcctggtcaatctctgatttttcaattcctaaaccagaggtagcgttaccttgtggatcaatatccacaattaaaacgcgataaccacggtcggcaattgaggctgctaaattaatggtcgtagtggttttacctacgccacctttttggtttgcaaccgaaattacatttaccatattgttcatccttccctattacttccttttcaattcaattgtgatcttataatcatccggatctttattttctgttactttgactttaattcctgagtcttcggctaacttaaccgccttcttaatggtgttaatttgtacctttaagtctttaggaactcggctaacgacccgcttagcttcttttttagccttaggcttagggttaaagtaaacatccacatcttgcacaatctcttcagtttgtttaacgtttaagccttttgcttcaatttctgtcaaaacgcgatcttgatctgcattacttaagccgatcattgcacgaccatgacgagcggtaattttgccagcaatcaaagcttgctgcacattatcatccagcttcaataagcgcaatttgttagccacataagattgagacttacccatatttttagccaaagcagtttgagtcaaatcatttaattccattaaattagtataagcttttgcctcatcaattggatttaagtcttcacgctgtaagttctcaatcaaggctaatgaagcagcttgatcatcactcatatttttgacgatcgcaggaatagtctgccagcccaagcttttagctgcacgataacgtctttcacctgcaataatctcatattgctcgtcatcgccatcttcacgaactacgataggttggagcaagccatccttatcaagtgtttcagctaattctttaattgaatcatcagaaaattcacgccgtggttgatagcggttaggaaaaatcttgctcaattcaagatcttgaacctgtttattcttaggaatttcatcatcatgatgcataaaagaaaataatgacataatatacccctttctgtttaatgaatcggtttgcgccgcggggtgcctgcttgacgtggatactttttaggtgttgctttgactttttgaactaagattagagttcgttcttcttcgctctcaggtagagtcaattcttcttccttaatcagcttaccgcccagcaattcaagagctttttgaccatcatccaattcatcttcggcttttggtcccttgagggcaataaagtaaccatcttttttcaccaaaggcaagcaatattcactcaaaacactcatccgcgcaaccgcacgagcagtaacgagatcgaacttttctcgataaagcttattttgaccaacgtcttcagcgcggccatgaactaattcgacgtctttcaagtctaacttagtaattaagttctttaaaaaagtcaatcgttttgccaaagaatcaacaatggtaatcttcaattctggctgcaaaatcttgagcggaattgatggaaaaccagcaccagcaccaacatcacaaagagtggcaccatctttaaaaacatcgccaaaagtaaacagcggcgtaatactgtcataaaagtgcttaaggtaaacctcatcttcttcggtaattcgtgtcaaattgacatgctcattaacttcgatcaaataattaaaatatattttaaattgttcaatttgttggtcagttaatttaaaattgtgttttgatagttctaaaataaatttttcaggattcatttttcacccgtgaaaccgtgtttcacacctctaaatttaacgcaaaatgcattgattagtaaagatatttcatcttatcaattatgaagtatttttactcaatcgtcaaagttttgccgcccgcaaaatagggtataataaggcgcaaaggagttaaaaatatgattgttactttaattgttttagcttacttagcatataaaacatatttaggctataaaacaggctttacacgctatatcatcggtttaatctgttccgccattgtctttatggttgccattttcatgcaaaatccatttggtaattggctatacacacaatacactggagaaatgattaagactaactccactaacaacgtggaattaatgattgcacgctttgtcgctttctttattgttttcttcgtgggcaaaatgatcatgaagattgtcaaaagctggattcctaacaaaaatccacatgcgactaacttaggcagtattctcgacaatgtcttgggtgctctagcctccctaattgctagttattttgttgtttatgtagttttgtccatgttcaatgcactacaaaatccatggtttatgcagcaaacaattgattctagctttttgaggtttatcatttacaacacaccggggctttcaaacggtgtcttcaataatatctttaatattggcaaaactgtgggataaaatatatcaaaaaagatctgcttgtatcatactgagcagatctttattgatatgttttaactaaattaatactacatttatgaaccaacattcgatatacttattagcgcaggaagttttatgagcggcggctggttctccccccggaggtgaggcctatgggctacattgatgaaagggttccagccatgtcggtttacgagagtatctccttgatgcttttgttcggtacatttttgttggctttgctgacatatattgaccaccaccaaaaataaaaaacgccgctcaaacatactttggccagttattgagtagcgtttaacgtaaaatttaacatttgaagccgccgctcttaaagcgggctgcttggagtccctaggactcctttttctttagtcattatagcatatttcactaatcaccgaaattatcatattcaatatgttcatcattataaacaaagattgcaccaattcgatcagggttatcatgccaaccctttagtggcttgccagcaaagaataatcgtttgcattcaatttctgcttcaaccgatgttttggtaaaagtagtcacaccagctaaatcagtctttacaggatacccggttctaggatcaatcaaatgatgatactttttaccgttaactactaagtagcgctcatatgtcccactagtaacggctgagcattcaggcaccataactgacgtaatattgtcgcctcgcggctgtttaggatcttgcacaccaattgaccactggccactaattcttttaggcgaatcaccaactaacaagatattaccgcccagattaataattcctgcttcaacgccatatgcacgccacaagtcacgaattcggtcggcaatccaacccttagcaattccacctaggtccagctccatgcccttcattttaagaaaaacagattggtcactgtcatttaaaaccaccttaaatgggtcagttaacagcattctatctttaatttcttcatctttaggaacatgtgcgcctttaaaaccgatatgccaaagcttaacaactggtccaatcagagcattaaagccaaaattctcacggctcttttctactgccaatttaaccaaaccatacacagcactagagacctgtaccggatgttctccagcagcatgattgatatccattacttcagattcatctcgattaacggtaaaaatatcttcgtaatgatcaattaaatcaaatgatttttgcaatagatcacgattttgagtaccaaaaatctgcaatgtaattgaagttcctaaagcatgatgatcaccaaccacctgctctaatgctaaatctttaatcataattatttctcttccaaatataaatcacgcaacgcctcacgtagttctgtcgttacgccaattttttcttgtaaaaagttatcgaaactaccaaaattctgctcaatagcgattaatgaagtatccaaaaaagcatcagaaactgaacctaaaattcgcatattagcgcgaaaacaaagattctcgccctcttcttgcatttttttatctcttttggcccgatagttattaagcatataatttgagtacaaatagtcctgtctaattgtttccatatctacgccaagcagatataacaagactacagttaccaatccagttctgtcttttccttctgaacaatgataaagtacagcacctttttcagtattggccaacagctctaaaattttatgcaagctatgttgagcgtgttctttcaatacatgtgacttgtaacgctcacacatcattctaaagccagcatactgatcttgacgataagttgcgaatacttgggttaagtctttcttaccgcctttggtgttgtcatcaacagaaattggaatacagaaatgctctacgccagggattttgctgtctggacaatggtcacattcagttggtgaacgcaaatcaataatcttagtcaagccataattgagcaaaaactcttgatcatgtctcgttatgttgctaatcttgcccgttcttaataaccgatgcatcttgaccttacgtccctgatagccaacatatccgcctaaatcacgcggattacaaactttttctaatggcaaaatatttggtttcattaatttcatctctttattaagtattttgataaaaaagccggatagtgtccctatccggtaattttactatcacgtggtaagtcacgcaaaattatttgttagcttgttcaacaaatttaataaagttagccatcatagcatctagttgcttaatataatcttcattggtcaaatcgccagtttctttatcaaaattgcttgcagcaccgccaattaagatttcattgcctggcaaaacattggcactcatgtctggtgaaagcaagatttcacgagcatcttcttgcgcacgactagatccttgaataccgtatgaagtaccaacaactgcagccggcttcatcttcatcacattaggaccagcatgtgaacctaaccattcaagcgcactctttaaggcagctggaattgagtgatcatattctggtgtagccaaaattacaccatccgcattcttaacatcctcgatccacttcttagtaacatcatctggctcatcagttctacagaaaggcttaagttgatcgatttctttaacttcaatatcagcttgctcaccataacgcttagcaataaattttgctaaaaaacgattgaaagaaaatggagcgtttgtaccaacaattgctaaaattttcatttaaataagccccctacttagtaagttgtgcataccaatcatcaacttcatcaaagaagtgattcaaaaacttaagtgtacctgcatcggtcaagtcgcctttatcatcaaattgttttggtgccaaacccatcataaattcgtcaccagcaaagacatgagcactaaaaccaggtgcgcccaaaatgctcttcaagcgagtttgcgaacgagacgcaccttgaggcattggtgaagttgacacaataactactggcttatcatggaatgggtgaacagaactagaaagccattcaagtgcactctttaaggcacttgaaaccgagtgttgctgttctggtgaagcgatcaaaaccatatctgcatcagcaatttttttacctaaagctaatacgctagcaggagcatcaacgccttctttatacataggcaagcccttaacagtcgcaaagtcaaaatcatacttatcgcctaagtccttaataatgactttaagtaatttttcgttaaatgagttatcggcattggagcccgataaagctaataccttcataaaaaccacctttcaaaaatcctcttaattatcattatagactaatgtagtttaatttatgtcattttaattttaataacaacaagaaaaaacgccttcgataatgaaggcgccctctactgaatgaaaagcacaaatgattggtgaaatttctatgccaagttatccttaagcgaagcttcttcgtcggcagcaaacattgggttttcttgagtttcgctgagacgattgttaagcatagcatcgtggatttgagcattcaacacattgacgatttgagtttggctgaagcttgcaatctcattaacaatcaatgcagccatacctgtagtagaaatccagttagcaattacgatgtcatgaatcttttgatcatcataatcaacatcaggatattgttccttgaacttttcagttccaagttccatcaaagtgtcagcaatgatcttgctaccaaacttgccatcaacgaacattgctctaaacaagttaacatgagcttgagcaaaatcaatgtatgacaaatccaagtcaattaaaggttcaccaacgtacttttgttgtaaagtatgagttctcaagtcattagagattcttctcaaaacttgattgcgaagatcatccatgttgttaaattctagatacaaaggttgggttgagaagtgtcctgctttagcaatgctacgagcagtcaaaccttcaataccatccttgattgccatcttgtaggctgtatctaaaattttgtctttactaatttctttttttcttgccattttaatgcacctcaatcattgtataaaacatgtgcttttcaatacacttgttttcttttcttcatcactataatatatccaaaaaaataacaattgcaagtcttatacactaacttattaaaaaatattatcatcgcttaaatagcgatgagccgttgtctcctgtaaattgatcataatgtgaagaagccatttcaataactgcttgcttgtccaatccttgtgcagcacaaaacgaaaagaatgcagcagataaaatatagccgcgttcacgatcatctgtcaggttatctgagaacttcatattaatcgaatgatttgcataatccgttgtcaattcaatcgatttattttctggtttactactcattctattgcaacctcttttttgttctaaaacaaataaaattaaaaattcccggatttaaaattgaagtgcaacactaagtgttaaacaaaaaggccatgaagacctaaacttgaagtgacgaaaaatcaagaaaggaagatcttcatgaccaattcaaattctagcatttctaagcactatcatcaattaaccagcgtacaacgtggacaaattcaagcaatgctggattccggcataacttcccgtactgttatcgctcaagaagttggctgccataagtcgacaatcagtcgcgaaatcaaatgcggaagcgtcctgcaaagagacagcagctatttattgtatgagcactattacgctgatactgcacagatttattatgagaagcgtcgcaaaaactgctatcagcgcaatccattgaagcattatgctgtctttttgagaatgctctccagacgctttaaagctaaatttgatgccaccagcatcgatgagttcgttggtgaattcaaaaggactatgccaggctacccttgtcccagcacaccaaccgtctatcgctatattgatcagggcttgctggacataagcaatattgatctgcctatgaagctcaaaagacgcaggaacaagcgtcatcacagccatggcggtcacgctttgcacaagaagcatcttggcaattccattgaacagcgtcctaaggaggttgaagacagaaaagctccgctgcactgggaaggagatctggttaaaggcgtcagacgcaagaatcagcctgctttaatgactttgactgaaagaaccacacgctttgaagtagttatcaagattcctgactatcgggcaagcacatgccaaaggctgcttcaaaaggagattgacagacatcctgcctggtttaaatcaatcacgtttgacaatggctctgagtttgcggatatgaccaagatcaagggctgccagatttactttgctcacccatattctccatgggaaaggggcaccaatgagaactgcaatggtcttttgcgtcaattcttccctaagggcaagagcatgaaagacaagtcaaaagcttatgttcaacaggcaactgatgccattaaccacaaatatcgccgaatcctccaatatcacacagcagaggaactcttcaagcaatatatctcttcataacctaactgttgcacttaatttgacaattcaggaaaattaaaaatttaaaaatttctattataattatattacaaaatcaaaagaattagaaagcgtgtttttatcaatgaaagtttcaacttggcgctcatcatgcacctcaattttaatcgggaaaaaggcctctctttctggcagtatcatcatcggtcgtaatgaagatgctaagactgcttggcctaagcatttagcctttaatccacatcgagataatgtacagaaaaaccattttaaatccaaagacaataagtttgaaatggatttaccaacagctagctactcttattcttcaaccccagaatggacagataagtacggagtgttcgaagaagacggaattaatgaatatcatgtagcaatgagcgccaccgaaagtgcctacgcaaatgaccgagttttagctgttgacccctttgatactgacaaaggaatcttagaagaagcaatggtcaccgtagttttaccttatgttaaatccgcacgtgaaggcgttcagcgcttaggagaaattgtagaaaaatatggtgcagcagaagctgacggaattctctttggcgatcgtgatgaagcctggtacatggaaatcggttctggccatcattgggttgcacaacgaatcccagatgattcctacgctattgtcgccaatcaactagctattcaagaaattgattttgccagtgacgacttcatgtattctcaagacctgcaaaaatttgtctacgacaataaactctggcctaaaaatcagccattcatttggcgtgatatttttggcactcatgacgatagtgacttacactacaacacaccacgagtatggagcggtcaacgtctgcttactccatctgtagcacaagaacccgaaagctttaacctgccatttattcgcaagcctgatgcaccaatttctgcgcaagacgctcaacgcgttttaagcgatcactacaacaacaccgcctatgatttaaccaatcagaaaaacagaaataatgccactttcagacctatctctgtggctactactcaggaatcacacttgcttgagttaaacggtgaaaacatgattcactggctagctatgggtgtggctgcgcaaagtgtttatgtgccattctatcctcaaggcactaaggtaccaaatacctggaaaaatggaaaagaaacctactcaccaaattcagcttactgggtctttaaactggctagcgtcctggttgatcgtaattggggtaagtacggcaccgctttaagcaatacgcaaagtactactaacgaaaaattgcttcaaattagacagcaatatgatcaaaaattagcacaagaaaaggatcaagaacaacaaattaaattagtggatgaagccaatgccaaattagctaaaactgctactgatgcttataaagaattgatcgctaaactaatcaccgaacaaactggtgactcaccgttgcgtttccaaatggatcctaacttataaacaaaaatgcctcaatgaggcattttttcttactattttttcttagtcattaagccgtccatcatttcataaatatggtcggcgtatttttctagccgcggatcatgcgttactagaataacggccttgtcacgctttttcgctaaatctttaaacaattgtcctacttcttccacattttgcgtatctagcgaagcagtcggctcatcggctaacaaaatatctgggttagcatataaggccgtcgcgattgctactcgctgctgttgcccaccagataattcatttggatacttattaaccagcttttcaatccctagctgcttgagtaagccttgcaatttatcttgcgacaaattattttgcttttttactttatcaatcaaagtaaattgctctttaactgtcaaaaatggaactaaattataagcttgtaaaacaaagccaattttattcaagcgtagttctccactttgcttagcagaaaaattactaatgtctcgaccattaatcaaaatttcacctgaagttggtttttgcaaggacccggcgatcgtcaaaaatgtacttttaccggcgcctgaaggccccataattaaaaccacttcacccttattagcctgaaaattgatatctttcaaagctgcaactttagcttcgcctttaccataaactttattaacatcttttaattcaattactgccattttactcaccaattgcctttgctggatcaaccttcaaaattgatctaatcggaatcaaactaccaataatacccatgactagcatccctaacgtaccactaatcataattgctggcgtaaaagtcattggcacagctgctggtaaagttaaatcagttaaccacatcaagataatcgcaattacaacaccaatagctactaaaattatggattgactgatcgttgcaccaactaaagttttacttggaattccttgagcccgcataacggcaaaattatgcattttttgcatagttaaaatatataggaaaacagcaatcacgatcaaagaaataacaaataagaatccaatcatcaattcaaaagttaagttttgagccgtatatcctggaagcttattaataaaggcttgaattgggtatgtcttggcatccttataattgaatttataattgctattctttgaaacaactgcagaagcggctacattaggagcgaccatccgcagttttttccaagttttcattgagccataaacaattggcgcaatattaatcttggcgttatttacaaaaccaacaattttatattttttcttagagccattcagagaaatttgatctccaagcttgtagcctttgtctttgaaactactgtctactgtaatctgattaccattctttgcttttttcccagcaattatatcttgatcttgataaataaactggtcttttttgatgcctaagaattgagctgaaattgagttttttccctttttcttaactacaattcctaattgaccaataattgcttcattcttgccaatttttgcgttttttaaatcgtcttttgtcagaattgactgactcatgctgatattggcatttttatttaaaacaatcttttgcgcattccaattttcaattgcttgtgtattctgacttgctaacccaacagccaaagatgacaacataaaaattaagtagctgatcaaaaagatcatcaaaataatcaagccatagcgcaatttttcatgcttaatttctttcagtgctagaaacataactacatcccctttgctagtatgtccaggctcttcttatagcgcgccaagttcttttcctgattttcgggatctgataagcataagttgataacttcatgactaagtaccatggcactccacaattgtggccccatattcaacaattgtcttgaataaattttgaaattatgtggtatcaagtactcattttgcgacatatgcaatttcatcattggttcatatttactgtattgaactttatcaataaacttaactactcttgcataaaaatgattaggatcaaatttttcattaggactcatcccagcatgaatgtcttcaatagcgatgtgatacatataaacatatgcatcaattaaatcatcaaaatatttataaaatgctcctcgagcaatgttggcattcttaacaatatgtgacaccttagcatctgctaacggataagtgctgaattcttctaacaacaccgcttcaatacgtctacgtttagcagacggtaaatttttaaaagtttgcttaaccattttgttttccccttttccaacacaaatgacgacttgtcatcaattacttatatcatagctgattttgacgagttgtcaatacatatacacaaaaaaagaaggcctctgccttccttctctaaactaaaactcgattatagtagtacaacctagcaacaccatcacggacgctaaatttgcttaatgcacaattatttggcgtatctatcttgtccatgtcgccattactcaaataatgagctgccatcattcgaatcaaacgaccatgtgccactactaataccttaccttctggatatttttgatatatttcgtctaaaaagttagcgcaacgtgcttcaaactctccgtagccctcaccatttttggcatatttaacatagtcgcgagtaacttttccccatggatcaacgacatccggatattccttagcaatatcatccatcttcttgccgtcccaatcaccaaaatcaaattccagcaaacgtttgtctaaatttaatttctttttacctttagtaaaaattttcgcagtctctactgctctcttcattggactggaataaacaacatcaaatttattttcatcaaacttagcggcggattttttagcatattcacgaccaaattcattcaagtctgcgtcaacttgtgcgccctgaattcgattatctttattcacgtctgtttgtccatgacgaataaaaactatttccattttttacatcaccttttcttaaaatcatacccttatttaactaatctttccatttctttactgtttttttagcgttttgaaatttaaaaagcttaaaatataaatagataattagaaaggggaaacattatgtcccgcgttacaattgaaagagatggtctcaccttagtaggagaccgcgaagaaccattcggcgaaatctatgacatggctatcctcatgcatggttttaccgctaaccgcaacactgaattattaagacaaattgccgatgatctacgcgacgaaaatgtcgctagcgtccgttttgactttaatggtcatggcgaaagtgacggcaagtttgaagatatgactgtgccaaacgaaatcgctgacggcaaggcaatcttagaatacgttcgcaccgatccacatgtacgtaatattttcttagttggtcattcccaaggcggtgtaattgcatcaatgcttgccggtctttatcctgatgtgattaaaaaagttgtccttttagcaccagctgctcaattaaaagacgatgcacttaaaggtaacacacaaggcgcagtctatgatcctaaccatattcctgatactgttccactagtcggcaataaattaggaatgaaactaggcggattttatctccgaaccgctcaagttttaccgatttacgaggtctctgcccgctttagtggcccagtatcagtcatttatggtactaatgaccaagtagttaaccctaaatatgctaaaaaataccatgatatttatgaaaatagcgaacttcatgccattacggatgtagatcacagattcactggtcaatacaaaaagtcagcatcagatttaactgctcaatttttaaaaccattattttagcgccgagtaaagtcgaactcagtacgaaagacgtaatgatccttagtacttacgtcaggttcaaattgaaattcaaaatcattaaagtcctgcaaatctgtgggattttttatttgcttctcggcaatgtagcgcaccatttcaccacgagccatcttagcgtgaaccccaacggtcttccacttaccattttttagttcctgaaagtcaaccgtaattaattgtcgtccttgactcaaataaggtttaaccaaacgtgtatattgcttggaagccaaatcgataactatattatcttcttgaaataaattttcagcgatatcactgccccagaaataatacaagctataatcacgaaaaccaaccattttagtatttaattctaggcgatatgggcaaacaccatcaaaaggccggagcataccataaaatcctgatagaatccgcaaattcttttgaatatagtcaagtgcaggttgtgtaaataaatccggagccatatattggtattgaattcctgaaaaagccaaaattgcaggggttaatcgttcatccaaattcatattttctagttgcaatatgctttgcttagtcacattttcactagcatgccaaaggtcttttaactgttcatttgaccttgacttaagaaatctttctagaattcgtgtcttatccaagaactgcggttttgactgaattggaaatgaatcacgatcaattttcataatttttgcaggtgcaataataattttcatttttagattttgttcctttacggtaaacttaaattgtgattaataagtcatgtggtaataagtcaaatgaaaggcgatgatatttgttctttttgatcataaatttgagtatatgaaactaagccttggtaaaggttgattttttaaatgttaaacttttgtttacttttaaatttagaccaatttttgaaattaagacctcggtgtcctgtacagtttgtcatctttgagcaatttaaagataactcgtactaattttcttgcagttaatgtgcaagcacgtttatgcggcgagtagacagcttcatcatacttcttttggtaatattttttgaaaacaggatcatgtaatcttgctagattggcagcttcaatcaagtaatatcttagatatctgtttccagtcctggccattggagtatgttcgttgctgtgatctcccgattgatattgattccaggttaggccggcatacttagccagctgttcttctttatcaaagcgatcgatacttccgatctcagcgataataccagctgtataggttttgccaataccgggaattgattccagaattttgctttctggtaatgcatcaacgatacgatcaattgctttttctagatctttaatagattcattaaagctttggatcatgttgtaatgaacagaaagcactgcatcaattgaatcagtcattactttgcctaagcgatatgaacctctaacagctttcttaattgctttagccaaggtatctggatcggaaaagcgtcctctgcctttaacctgtaagtaagaaattaagtcttcggtaggcatatccgcgatctcatccagagttttactatcggttacaatagacatcattgtagcaccgaaaagaggagtattaatcttatctttatcgacagtgattagtttattaacccgataatataaagcttcaatgaagtgctgtttggtacgagtcagttcttgaactaattcatatctggtacgcgttaaacgctctaaagcaagatagttgtcttgtctggcaatgcttactcgataatgtccaaagcttagatacaaagcaatgtaataagcatcgagaggatcagttttactttcttcaaagactttatgaaacctgctggtttctttggggttaattacatcagtctctacattgagcttttgtaaatcttcgtcattttggaaaaagtaagcaggatgaaaactgtaaatagatgtagcttccatgccaataatgatttgatcatagtgtttattttgagctagatctaaaatttgttttttcagttcactagcaccataaagatcattgacaaagctatcgttaattaagcgtttgttttgatcttctgaatcaagtgcaacgacctgtaaatctttagaactaacatcaataccgacaaataatttcattggaaatggcctcctttctttcaaatttctgatcatagattttgatcttcacatgttaacccctaattacagttcttaagttcaatctcgccagtataagtattcactggttgcttctttgaaagctgcacctaatcccaattgctcaaggactagcaaaaagaagcaatcaatacagcatgtgagttagagcataaaggaactgcctgggtggcagacttataaagcagacaaaactgcaggaggtgataacctagaccagttgaccaaagccaatgacaattagaggctaacatgcgaagatcaaaaagcaaatactaatttgattaattatcacaatatgactaattacaatttatataatacgaggaggaaaaataatgaatcctgattttgcaattgtcttaaattatcaacttaatgataaggctgatgccgactttttagtaaaaacagcccgtaatatcggtgctcgtgcagtgatgactgacaggcaaactgaagatttcaaaacagcttgcgctaagtatactatttttttagctaatccagaaaatagtactgacttaactaaggataacgtcattgataccatggtcaataaccgtaaagctggtaagactacaattattaatgtgcccgttgaagcaggcaagttttctgccgcaactcaagcaatgctggatacgatcaatgattggatgcaccaattcggtcacgccttcaacgaaggaaaaactagtgctttaaccagtagcgatggctttattttagaaaatcgccacgcaaattaccaaaaatatgtcttcttacctagtcctcttcctgacaaaatcgtggtagaaggcctagtcgaagaacctaaccgggtagaatggattgaacatcgaactgatcttgattttaactataaggatcaaaaattaactattaacttagtcaaaccagatgatgagtttgcttggcaagtgttgcgaattcaagcccaccgacctgaagatgacattttagaaacgaaattttagtaaaaaggcgttctttgtagcagaacgcctttttacaaccttatgtaattgctatttctattttcaaaaaaatttattcttgcttaagctttaactactgaaccattatcaaaaaattctctaaaacgacgtgcttctttatccagagtaatttcatcattaacttgcgataacttatagccaacaaaataaggtggcgcttcaaaacgtgtaatatatttagcacaaataccgtcatcattacgcggataaaagaatagattataagaatcgcagcggccattatacatgatatttaacaaatacttggcaccactttgaatccagtcagcccacaagtcaatgctatttttatctaacaagttaatattgagctcagtgtagccttgaacggggtgttcagcaatgttaacttctaccccacttttttcaaaaagggtctcaccttcaaaattattcgggtgaatatatttatagccatcttcatgttcaaagccaactatctgcatatgcgggtgaatcaaggaaccacctgaatgtggaccatagttcttgtaccaaacaattgactcatattggtcactagcctgcactttttcaaaacaagctagcgcaaaatgcatcaacttgcgattatgttcctgcgtataagtactaatatcgccgttatgatcactagattcaattagtacagtctgccaggtatcgcgcaaggtcgggaacttattcttaagccaaatcatgtcatcttccttggcgtaaatatcagttaaattttcaacatcacaaaatgggcaaacgtttttcttcttatccttacgataagattgcggtttgcctttagcaatgctcatttgaaaaacaagtggatcattagtcatatttattcctttttttatttaaaatagtttaaaatctaatgggtaaagttttactataatgtaaaatattttgtagctttactagcataaaaatacttgttatactttgttaaagcaaacgtttattcgaaatttatcaagagacgggttttaataatgcaatctagaacagaaatgagaaagcgaaacaatcgcaacaatctctatcttattattattggcataattgtcgtaattgcaattatttgtggctttgtcattcataatcaaagggtagctgctgaacgtagccagcgtgaatatgcttctacccacttcaaccctaatgtaacaatttatggtgtgcaagtaggcaagcttactgttaacaaggcgactgctaagatcaataaacaagctgataatgtcgtctttttaagaaataaaaagattattgctgaaaaagacgacaaggttcaaactatcagccaagctgaagttaaaaatattttcactaagcagcatactgatttgccaagcaaacaaaaatacgttttcaaatccgccaaaatagatgaagcaaaaaagagtttgcaaaaaatacaaaatgctgtagtcacctataagatcaatggccaggaattcaagctaaaagctgatgacctaattcacgaagttacttacaaaggtggtaaatataaattcaccgatgtaaaaaaactgcatgctaaaatggaagcgatcgatcaagaagtcaaaactctaaagaagagttataaatttactgttcctactggtaacaaagtcaatggcaaaacgattacggtaaaaaacgaaagctatggttggggaatttatgtcaagaaggctgtggctgcagtagaaaatgcttttattaatggtcaagatgttgttggtggtagtaagtatatttatggcgagggttatagtacctatgctcatggttatggcaagagcaatcatggtattggtaaaaactacgtcgttgtctccatcaaaaatcaggaactatgggttgtccgtaaagggaaagttgccgttcacttaactgacgttgtcacaggtactgaaaataagagtaacgctactcctaaaggtgtttggtatatcatgtacaaagaatcacctagcgtattgcgtggttataacgacgatggctctaagtatgcctccaaagtacaatattggatgccatttactttgagcggctgtggcttacatgacgctagctggcgtagcgattggagtaagtcagcctatcttactggtggctcacatggctgtgttaacattcgtccagctgaaattagaagtgtttggaacaacgttttaactaacgatgctgttatcgtatattaaaaaataaagattaatcgcctacttcaattgaagcgggcgatttttttgcgtaaaattaacagaaaagatatagatttttgaaaggatcaaatatgttagtcatcggtattatttgcttggtggttgctgccatttcttactttaaataccttagtgaaaagaacggacaagctaaccaaaaacaagctgaaaacaaaaatgaggcaaaatggcagcgcactttagcaatcattttcctcgttttcggaattttattaatcggttattggattgcattacgctaaaaaagacgtgaattttcacgcccttttttaaatataattgattaccacattacccatattagctcttccctttaaaactaaggtaggaccgccgccattgctttttcctttaactattacattaccaaggctaatgcttaattgattatcaatctgccatgataagggaacgtagagatttacatttcccattgaagcagttagattaagcacgactgtatcacctgctgctttagcatcatcaagatagatattggcattaccgaatgaagtttcaagattaattgactgtaaattttgtgaatgaatataacgtgaagaatcgccagccatcttttgattaattacgatattgtcaccatcttcaatcacatcttgaacatgatgatgtgttacttttgtctctgtatcagcatcgtcactatcatcgtcatcattccaatgaaaactcttcttgataacaatttccggatcttttttaaaaagcaagctcaatcccattgaaacaagcaaagcaataaacaaaatcatccaagaggataagaactttttaatgcccaggggacctgcataagtaattactaaaaaagcaattgagaaaacggacaccacaatgctcttatcaagcaagcccttaattaagcaagccacaaaaatgactgtcaaaataattgtccaaacgctaattttgaagcttaataagcctaattgactgatcaccaaaagcgcagctgcagcgattagtcctactccccacaaaattcttgcaaaactgtttttcattataaagaccttctttcatctaagcatgtgcgtaattctttgtagtatcgacgggatgcatatacagttttataagtatcatgaaactgtatcttgcaatctgaaatcgaccgagttaaaccataaatttgatctaaattaataattgtcgatttggaaatccgcatgaaacctgcgcccaaaatattttctaactcatacaatttatgtttaaccaagtatgccttatcttgtgtatgcaaaattacctgcttggcatctgtttcaaaaaacaaaatctcgttcagtggtaagtagtaagaaacattgtttctaaaacattcaatctgatcattgtgttcaataccttgtaatttcttataaagctgctctatttccggagaaatatttttagctttaataatcagttcatcttctacggcatctggatcaatctcaagttttactttcatgtttctcactcccttctgaatctgatatttatattaaaaaatatttcagatagcttttccatagttttgaactaagtggtaaattttggcttctaagtggcaaaaaaaataagacgacctctgtcgtcttattgcttattatcaatgtaaactagtaaaaaatgttatcagtccaaaaataattcctggaaaattagccgtgaatagcggccaatctttcttttcaccaagaattgcataaagtacccagatcgtgcaattaattgcagcaaccaacggctgaaccggattaccataatttccgttcaaattattaataatttgcggaatatatgaaacatacatcagtacagataataccgacccaatacgtccaatagttaaaacagtttttcggtctaatcctttgaattttttcaacaaatcgctcctttgtgcttcattataagaaaagctagagtcgattgcaaaaatcatactttagtggacaccttccattagcacattaattctcttaactaaaaagaacattattaccgcaaaggctacactgaccaaaccaacagccatgaaatattgtacttcagtgccagttgaatagaacttaacaatttgtgcattcactgcttgtccagttgcatcagccatgaaccacatactcatcatttgcgaacgatatgcattaggggccagcttggtcgtaattgataaaccaattggtgaaatcaacatttcagcaatttcaactaagaaccatgaaccaactagccaaaatggactaaccttgcctgctgtaccataaagcatccctggcaaagccatccacatataagatagaccagcaaaaactagccctgctgcaaacttgcctggagctgttggctgctttttccaatgttcccaaagccaaacgaagattggcgttaaaatcataatgaataatgggttaagagactgaaagttggctgctgtaaagtgccaattaccaatatgaagcacggttctttgagcggcaaacagagctaaaactactgagcctgattcttcaatgccccagaagatagctgcagcaaagaacaatggaatgtaagccttaactcgtgaacgctcaaccttagttacttttgaactacgtagcatcatcacaaagtaataaattggcagtgcaattgctaaaatagtcaataaagtaatgacattgtcaacgttcaattgaccaaagccggccattgcagctaatacaagggcaatcaccacgaacccaataactacccacttaataatattaagcaagtcacctctatcaataggatcattaggcgtcaaactttcaggagaaaggtattttttaccgccccaaacatattgcactaagccaaagaacatcccgattgcagctaaagaaaagccggcatggaagttcatttcattaccaaaaatatgaaagccaaaaccttgtgctgcccatggaactaaccaaggtgcaagaaatgatcctaagttaatcccaaagacaaagatgctaaaacccgcatctcttctgcgatcttcaactgaataaagaccaccaaccatgtcagatacatttggctttaataaaccagtaccaaccacaattaaggcaattgaagcatataacgccgttacaccggctggaagtgccaagacaatgtgacctaacatgatcaaaacgccgccataaaagacggtttttcttgaaccccaaacacggtcagacagccagccaccaactagggttgataaataaacaagtgaaccatagattgacatgattgatgcagccgttgtttggtccattcccagaccacctttggtgactgcataatacatgtagaaaagcaggatggcgcgcattccgtagtaactgaagcgctcccacatctcagtaaagaataacgtggacaaaccctttggttgtccgaaaaatgctgtatttgaatcttgtttccccaaataaaaactcccttcttatcatagataagcacaatagaaataattataccacgaaaaaataaggatccactttttacagtgaatccttatttattaggtaattattgcttcaaattaattgattgccttagcaactgcgttgttaacagccactttttcagcttcgatcaagtcaactttaccttcaataactttaatatccatcttaatttcacgactaagaagtggaatatttacctttggttcaaagaattctttaaattctttaagtctagttggagtatggaagacgcgagtagttactgtgatgaatgttgtaaattccatgtcaccaccgacagtcttatcaagccaatcccaatcttctctaatccagtcccaggctgcttgttgaccatgatggttgctgagcaaaccagcataccagccacgcaagtcttgtggtttaattacgtcagcattttcaaaattatcaacaattaacgcaacttcggccggatcaatcgtactagtaattgcgctacgaagatcaactttgtatgaaggatcagcagttctttgatattccttgattaggttttcgattaggttgtggctaccaaagttctttacttcattgattaaaacatacggacgaacatcagcattcattgcctctaagttgtcttcattagcagtgaaaatctcatgagctgttttaattgagtctttattttcagcgtaaagactggcacttaattcatatggacgaatttgtgcatcttcatcgctttcacctggcttaactttccagcccaaacgagcaacttgaccagcggataacttgtcataaagcttctttaagtccttttcttgagctgattcaggttcaacaaattggcgcaacttagcagcagtagcgtaaagagcattaataactacacttgacttcgagtcagcaaatttagtcaaaagtggcacaacagcagcataagaaatttgtttaccttctgctaaaagacgtaagtcttgcaataattgcaatttggcaattggatcaagttcatcaacatgagccaaaatatcatcaagcaaagtcttgtcatacttaacgataaagtgcgagttgttacctacattaattctaagtgggtgacctgcttcactacgtaaattcttgtagtaacctaagtcgatttccttatcagacataatcttaggtgccttgaagttagcattcaacggaatttgccattgtctaccaacgtctttaccttcaccaacgaagaattgttgttgtgaaagctttaagtgaccatcgctactatcaacatatgcactaactactggataacctggttgctttaaccatgagtgcataatcttgccaatatcaaggtcagttgcggttgaaagagcatcccaaagatcgtcaccagtggcattaccgaacttgtggtggtcgaagtaatacttcaagccttttcttaaggcatcgtcaccaagaagtgaacgaaccataactaacattctagaacccttggcataaacaatggcactgtcgaaggcagagtcaatatctgctgggtcattgatttccatttgaattggttgaacaccgtcagtagcatctctagtcaaagctgcaggtgcttcactggtttggaacatttcccaaatatgccaatcaggttctagaccatcaactgccaagtattccatcatgttagcaaaactttcgttaagccataaattatcccaccatttcatggttactaaatcaccgaaccattggtgagccaattcgtgagtaataactgtagcaaccaatttcttcatttcaaagctagtattgtctggatcaagcagtaaatatgcttcacggtaagttactaacccccagttttccatggcaccagcactgaaatctggcaaagccaattgcaatgattgtggaagtggatacttagtttggtaaaattcttcgtaaaattcaattgcgttcttagcaacacccaaagcaaagtctaattccttaggcttgtgggccttagttgcataaacaccaattaagacgccatccttagtgtgagtagtctttgattgcaaatcaccaaaggcaaaggcaaccaagtaactagacatgcgaacagtttcttcaaagtggtggtagccgtccttgtccacttcaacctcaggcatattggcaagagcaacttcgccatcttcttcatcccacttaagcgcaagactaaaagtagccttagcttctggttcatcaacacatggaaaagcttgacgagcaaaagtagtttcaaattgggtaccaataatttgcttcttcttaccttctaactcgtagtatgaaggataaatacccatcatagtatcagtaagtggtgcactataagcaatttcaattacagccttgctgtttacaccagttgaaattttgatagcttcctctttttcaagtacttcaaaatctacctttttaccatcaaccttaacgctgtcaatggtcatatatttttggttaataaatactggattttcaattacttcaccggtaatcgttgaagtaccattaatttctttttgtttacggtttacgttaatgcgcaaatcatagtgttctggatggaaagtttcataaaaacgtttaactgtcattttttacctcctattaacagctcatttacttttaattctaccaaaataaagaaaaaagcgctcaaaaaaggctatttcttattgattgtaaggatgacgtttcagttctgtaacattgctgtcatattgagcttgtactatagaagcatagtcattaagaaataaataagttttgaaagaattaattaaatttaataaggaatgaatacatcaatgaataaacatgttaaatctactttagtaaaaatcttagctgccttagcacttgcctttgcttgtgttgcagttgcaaatgctttttctaccaatacttcaactactcaaactgttcaagctgcaagaaagctttcaaaagctgaaaaagctgctaagagatggatcgcaatgcgcgaatcaggtggtagctacactgctagaaacggtgtttgttacggcaaataccaattaaacattggctacttacatggtaacctttcacctaagaaccaagaacgtgttgctgataattacgtttacggtcgttacggttcatgggttaacgccaagagattttggttagctcacaactggtactaaaattaaattcctttaattcccaaaagctaaagaaaaccagcttagtccaattgactaaactggtttttgttttactcaaaattatcttgcttgataaaacgataaagtgcaatgactaaaactaagatcgagcacgccattcctacataggccattgttccaatgtggacagcattgtcagcagcttcacgggctacttgattttccattgcatagcccacaacccatttacgcattaataccggcgtcaagacaaaactaactgtactaataattgaagtcactaacgctacattacgcgaatatggttctttaaagaactgtgctaatacgcagaatgctggagcaatcatcaatagcaagatccacataataatccagcgcccagaacttgaattcatcatctgcgcactattagtggcataacgatatgagctccaaagcgatccaccagataaggtattaagcaaactcaagaaataagatccacgttgtccataaacaccaccattattggacagaataccttgaacaagttggaaactatcagttgatccagccgatgaaaaatcgaccgacacaacttgcttcatataagtagctaaaaacatggtaactgagccacctaattctagtgctcttaacatgcttaattttcttgaagctttcagatgaaattccagacttaaaactcgatcaggatggtgactgtgaccaatgataaaaatccctgcaatgacgatcaaggctaagataaccaatccccaccagaatttaatcatggcgaaaaataaggctaaaacaataatcgcaaccgaaatatatggtcggtcagaaaaaatattccaaaagttcaacttaacatgatggtaatttttccttgatgcatttgcgacattttgattaataatcggctgaggattactaatttttctgctgcgaaattcttcacgtgttgttgctcttgtcttagtataatcggtccgtgaacgatctgcgccggcttggccgtgctcttttttcatgcgatattcacgccgcgacatatgtgccataaactgcagcccccttctcaaagcactatagtagcacattatcacttttttgcttgaattaagaatgaaatttcaaagaaaatttagctttgttttgcatgtgctaaaatgaatattaataattgtgctttttttagaaagagataactttttgaataaaactaaatcagcaaaactgccagctggttggcatatggccttttataccttatggctcggttgctttatcactgggatgggctattcaatgacaatgccctttatttcactatttatttcagatttgggtaattattctaaactgcaaatcaatctttattcaggattagcttttgcaatgacttttattgcccaggcaatagtttcaccatattggggcagcctcgctgaccgcaaaggtagaaaactaatgtgtatgcgtgcttctggtgtgatggctttaactattaccctaactggatttgcacccaatgcaatttatattattgtaatgcgttttattcaaggttctttttctggttatattaacaacgccaccgctttaatggcaagtgaaacgccgcatgaacgtagcggctgggtcatgagtcaaatgatgacggccgggactgccggaaatttggttggaccgctattaggtggtgctctctccagcttctttggcaatatgtttggtggcgcctgggggtatcggattccattcttcattaccggtgttttaatgttcatcgtctttttaggtacaacgttcttagttcacgaagactttactccaatttctcgtgaaaagatgaagccgatgggcgaaatcatgaaaagtttgcctagcgtgaaattgattgtggtgatgtttattactaccatgttggtacaatcatcaaccatgtcaattgatccaattgtttcattatacgtaaaatcaatgatgcctcatggcggggatgttgcctttgttgcaggtgttgttgcggcaacgcctggtcttggaacgctaattgcggcatcgcgaattggacacaagatggatgaagttggaccgttacgcgtattgcgaatcggcttagtcgtcggtgcccattgtttgtaccaatggctttgactaattcgccttgggtactagcaggactgcgcttcttattagggattgctagtgcagggatgttgccagccgcacagacggtattaactttaaacacaccaagcgaaagtttcggtcgaatctttagttataaccagtcatttcaagcagttggtgccgtgttaggatcgttaatgggatcgactatttccggtttttcaaattatgcaacggtattctggctaactggatttacgttactgatcaactttgtgcttgttttgatttttgcttggggaatttcttatcggaatagataggttaagcatattcctaaagtatggaatttaaaaatgtaataaaagagctgtaaatatcacaaaaaatatttacccggatttaaaattgaagtgcaacactaagtgttaaacaaaaaggccatgaagacctaaacttgaagtgacgaaaaatcaagaaaggaagatcttcatgaccaattcaaattctagcatttctaagcactatcatcaattaaccagcgtacaacgtggacaaattcaagcaatgctggattccggcataacttcccgtactgttatcgctcaagaagttggctgccataagtcgacaatcagtcgcgaaatcaaacgcggaagcgtcctgcaaagagacagcagctatttattgtatgagcactattacgctgatactgcacagatttattatgagaagcgtcgcaaaaactgctatcagcgcaatccattgaagcattatgctgtctttttgagaatgctctccagacgctttaaagctaaatttgatgccaccagcatcgatgagttcgttggtgaattcaaaaggactatgccaggctacccttgtcccagcacaccaaccgtctatcgctatattgatcagggcttgctggacataagcaatattgatctgcctatgaagctcaaaagacgcaggaacaagcgtcatcacagccatggcggtcacgctttgcacaagaagcatcttggcaattccattgaacagcgtcctaaggaggttgaagacagaaaagctccgctgcactgggaaggagatctggttaaaggcgtcagacgcaagaatcagcctgctttaatgactttgactgaaagaaccacacgctttgaagtagttatcaagattcctgactatcgggcaagcacatgccaaaggctgcttcaaaaggagattgacagacatcctgcctggtttaaatcaatcacgtttgacaatggctctgagtttgcggatatgaccaagatcaagggctgccagatttactttgctcacccatattctccatgggaaaggggcaccaatgagaactgcaatggtcttttgcgtcaattcttccctaagggcaagagcatgaaagacaagtcaaaagcttatgttcaacaggcaactgatgccattaaccacaaatatcgccgaatcctccaatatcacacagcagaggaactcttcaagcaatatatctcttcataacctaactgttgcacttaatttgacaattcaggcaaaaaatatttacagctctttattattttcaattttttacgctaccatcttttcataaatgcgatacatccgattatcataagcgcacattgaaataaccagattatagcccgcgttttctttctgccacttttcaattgcgtcaactgcgatcttagttgcatcttctgcaggatagccatacacacccgtagaaatagctgaaaaaattacgctatgcaatcccgctttctttgccaaagccagtgaattatagtagcaagaagctagcatatgtgcatcactagtcttgccagcataaactgggcctactgtatgaattacatatttcgcaggtaaattatagccatgtgttatccttgcttcacctgttggacaaccatgcaaagtcatgcattcctcaagtaaccgtggaccagctgctctatgaatggcaccatcaacgccgccaccaccaagtaatgaattattagctgcattaacgatcgcgtcggctttcatcttagtaatatcgcctttaataatttttatgtctttcataattatgtccttagaaataaccaacatttctttctaccaccattctaacaccaacaacatcagttaggctcagaaagaatacaaagcatattgttatttttatattacgaacttgaattgatttctatctttagtatcctaatattaattttagcgttataggagcaacgaaatgaaaattttacgacgcagtttatgcatcatttcgatcaccttattttcttttgctttgagcattctcattcctagtgttcaagctagcaaaatagttttagatgatctcatcatatttttatatttaattggaatcgtaattctgggcattctgttgttgtctaacaaatttgattacctatcactcagtctaagcataatcttgctactcgcaactatcattgcttggatcagattcccaatgattagcattatttatactttttttatagcttatctgagtatatgcttactaacaatttttattgctaaaaggattaagaaataagtcactatgttttctaagaaagaactaaaaatcatcaataacgcattaattattatctatttgctttcagtcggcccaacattcagagactgtaaaatattttgtgtaaggatgaataattccttaaatttatttcttaaaacattagaaaaaggagttcctttctcgtatgattggtttgaacaaaaaaacacatacagaaagaagaactccttcatgaatgattttacaaaaaatatagcacaagctctattcaatcaagacaaaataaacgatttattgcgcaaagagctacaacaggctgttaataacttgctagaagctgaattgactgcctttctgggctatgatccctatgccagaaatggctggaatactggcaattctagaaatggtgcttatttccgcaaggttgatacgcagtttggaccaattgaagtgcaagtgcctcgagatcgcaacggccagtttcatcagcacacgctgcctgactacaagcagcactctgatgttttggaaagcacgattatcaagctctactccaaaggcgtaactaccagagaaatcgctgacttgattgagaaaatgtatggcagtcattatagtccagcccaagtatcaaatatttccaagcagatgctccccaaggttgaggcttatcacaagcgcaagctaagcgacaagtttttctgtgtctatttggatgcgacataccttcctttgcgccgagaaacgtttgagcgtgaagcagtctatattgccattggcattaaacctaatggacataaagaagtcattgactactgcattgcgcctagtgagaacattgaagtctggacagagatgcttcaaaacatgaagtccagaggcttgaagcaagttgagctctttctttctgatggtgttgttggcatgaaagcggccttgaccaggacttatcctaaagctcattttcaacgctgcttggttcatgtcatgcgcaatatctgtgctaaagtccgggtggatgaccgcgaaaagatcatgaacgaattcaagcagatacatcaacagacaagccaaaaagaagctgcagctgtcttgcatgaattttatgcaaaatggaataaagcttatagccatgttatcaaaggtttgagggaaattgagcccgatctgctggtcttctacaattatcccaaacaaatcagagcttcaatttattcaaccaacatgattgaatcctttaacaacgtcatcaagcgtaaagctaagcctaaggcagaatttccaactgaacagtcgcttgatgtatttattggcatccaggcaatgagctacaatgaccgctatttcaaccgaattcataaaggctttggtcaggttcaggataccttagaatcctattttgattaaataaatgattaaaaaatcaatttacgagaaagaactatttacacaaaagatttgacagtttcaacattcatcttcggttttactaaatcaaatgatttcacaagtactttctttttaattgcaaatatcattttagtttgtttattcattatcattgctatcagaattgctaaaatcaatttcaggctaaagacacaatattatctactaggcttcatcactcttatttcaataatagaactagcctaccctggactgacattaaatgaacgcattagcaattattttgctatcggcaatattattttaggcttgctaactactaaaatctcaaagaaattagtttaaatataggacacaaaatgaaatatctgaaaacaccaagattaattaacagtattttgattactttacgtcatactgctataaattattgaattcttattactttaaaactacatcaggtattttcaatcattcaataaaaaataagactagcactaagccagtcttattttctattaatcaactattcttggggtgagaattgccatactgttccatcttggctacggtatgagccatcactcatctttgtaaatataaagacaacttttttcgtcctaattgtgtaaccgttttttgattcagttgtatcaactcggcccaaatcagccttaacacctgtttggggtggattatttttcttaatagaatatgcttgtaaaatttctttattaagtttagtcttcttttgctcagagttgttactatttttagcaactaaaatagcatgattctttgtaaaatacagatcaaaccaattacttaagcgattttctgtgttgtctactgttaatgttcgattaacccagtttttaggtaccgttgtttgattattgtagaaaaacattccaccaataactgctacaagtactgtaactactgcaattacggataacgtcattttctttttcatgatacgtttcctcttaaattcagcattaattatttggcactaagcctctcgaaatgagtcttacatttcctgaatacatgctaacccatcggtttctatttgttttaaaattgtgatccatccaggtactgtttctatacaaatagccactgtaggcaccatcattataataaactttagaaggtgttgtgttgagtaagttcattccatctcccctaccccaactactgtatctataaacattagatacatatttatgaagcggaccatttttgattggcccatacactttaacactctttgcttctcggactgtagtttctgaagcctgaacattctaactattggtagttaatactggagctacagttacacctacaagagtagcaaccactaataatattgactttttcatttttatttttcctcgtttaattttgatgttagtactactttcttacgaacagaagcaggtgcaggaatgctctttacatcatagctgtacaaatatcttctatataaggtagtagcactcttaccaactttttcacgcataacttttgaaagatatcctctataaccgttatactcaaaatagtgagtggcaccataatcataacttgaacctaaggtgatccaaattctcctaggtttatagtaatctgctcttagttttgaactcacagttgtttgtgtttcagctgatgcgctaacctgattcgaaactgtaaacaaactaacgccaactaatcctactagtgataatgaaactagttttcttgaaattgatttcatttttatacagataaagtaccttcactctctggccaaatcattattatttcctcctttcgtatcttgattatcccatgaaactctaatattacttctaaagttgcgtatcacaaaactactctttccaattagtcaccctatcttcatatcctagagaaataagcatggcttttacttctttagcttttgctatatttccttcatacaaacatttatagaaactcccacatgccttataaaaaagaaaatgattagtattgttcaaattcagtaagtaatctaaacaatttttaacctgatttccttttaagccataattacgccagcaataaaggtaattgatacaaatacttgctatcctatcttcatatttctctgaatatgaaaccttctcattgtaatgtttcaaaagaaaactaatataattatctgcttgttctgtagaaaaaacaggaatacagttatcgaataatcgcagcatatcaatattttctacccagttatcttttgcattaaattcagcaataattgtacttttgaattcgtcacctaactcatccaattgatttcgtacaattgctactgcaacaactactctgtacttaaatattctgctatcagataatttcattacttcttgcaaacattcttcgattttttctttatttgaaccattaaatgcacttttcagtttgttttcaagttttaattcaattaagtcctcttctgataaaaaatcatctttaatttgttccaaaaactgatctacatcaatatgatgggcaaacaagatcttaaatagactttctgcagaaattccttctattcctcgttcaattttagaataatggcttttatgaattattccttgaatcatttcatcttgcgttagtcctaagtgtattctttcttgtttcaaggcttcaccgatagtcatctttcatccctccaatttaacttcaactatactatctttttaattttctctccatacaaaaacgccttgctcaaaagcaaagcgttttttagcataagcaatatttgcattaacccttatcggcacctgcagtaattccgttaacgtagaacttctgcatgaagacgaacaagatggtaatagggatagcgatgattacacaccccgcaacgaattgtgcgaagtatgcggtcgcattacccttagctgtgtggaccatgttgtaaagtccatatgcaaccgtgtaagtcttagcatttcctgaagttgaaagaataatacctgagaaaatgaagtctgtccatggagcgatgaaagcggtcaaggcggtataaacgatcattggctttgaaagtggtaaaccaatgtgtaagaatacttgccacttagtagcaccgtcgatttcggcagcttcgtcgattgaccgaggaatagtatcaaagaatcccttagcaacgtagaagcctaagccggcaccaccaacgtaaaccaataacaacccgaagaggtttaacatgttaagacccttcaagatgtagtacaaagcaatcattgacatgaagcctggaaacatccctaaaaccaatgcaatttgtaagaatggttttctgaatgcaaagcgaagtcgtgataaaacgtaagcaactgaaatagttaagaaagttgaaattaccattgaaagcaatgaaataactaaagtattaatgatccagttaccaaatggatattgtggattagtaaaaataccaatatagttttgcaatgtgaatttttccggccagaaggtcgaaacgaatccagtatcattgaatgaaaaacttgctaagacgatccagacaatcggtaaaatccatagaatcgctaaaacaattaataggatataccgaaagattaatgagagccgtctttgatttgaatatgacttcatgtctagccctccttaaatgcattagtacgacgatatgcaatcagtgaaacagttgcactaataatgaagattaagatacccaatacggcactggcgttataacgctgttcctgaccgaaggtcaagttatataaccacgttaccagcaagtcagtcgatccggcaccattatacttactgttcattggtgcaccacctgtcagcaagaagataacattgaagttgttgatgttaccaataaattgttggataagtgaaggtgccatcacaaataaaatttgtggaaaagtgattgaacggaaaatttgtgcagcattagcaccatcaatcttagcagcttcaatttgatcttgtggcaagttttgaataatcgctgttgaaaccaacatagaaactggaataccgatccacatgttaacaagaataacggtaattcttgcaactaaaggtgaagcttggttatcaataaagtgaattggtgaactaatccaatgcaagttcatcaagatattgttcaaagcaccttggtagtccaagaactgcgccatcatcaaaagtgaaacgaattgtggtacagcccaaatgataacaaagattgttctccagaatcccttgtgcttgattccttttgattcaatcaaaagagcaagcaaaacaccaaagaagaaagtcgtagcagtagctgctacagcccagattaaagtccagcctaagactgggaagaaagtaccagctaagtcaccactcaaaacattgccaaatgcttggaagcctgtccatgagaaagcaattgggtgttgacgatcatagttggtaaaggccattgaaatcatgaagatcgttggcaaaatcgtaaagaacaagatacccaataatggaataaccatcaaggttgcgtgtaaccgagtatcaagcaaactcttaagttcttcaacgttagttggaatatggtccccatcacgcttcaaaatataattatgtctagttgagcgtaagttgacaatgtatagataaatgattgctacacataagatcaaggccaatacaccgaataacaaaatcaaaactgagtttgatggttgcttggttacataaacgccttgtgcggcatcataaacaacttttttggttttaatagtacctaatgtagctaatgaatttaaagtagggataccactgaggataaaccaaacaataaagataatttctgaaagtaagagtgaaataccttttacccattgtttgtttgccaaggcgttactacccattaagaagaatgataacttggtagcaatgtcaccttttgaccaaacctcgcgatatgttgctttaggagctacatgctttttctttagaaacataacttctccccttcttaggcaaaaaggctggacaatttttatttagcccaacccttgcttatgcttttagcaaattatttcttttcaatgttcttagcgagcttagcaagttgtggcttgtattgtgctggcttaatcttgccgtcgtaagtaccactgataagcggagctgcaccattccagaatgcggccatttgtggaagcttaggttgcaatactgagttacctggcttagccatttcgattacagcttcagcaaccgggtcactcttaacagcacttgagttgacagcgctcttcaatactggaatttgaccagcgttcttatgagcaattaattgtgacttcttgttagtaatgtaagcagctaaatctgaagcagccttagcattcttggtgttagcattaactgcgaagccttcaataccaaggaatgcttccatttgtacgctcttaccaccaacttcaatcttaggatacttagcaactgcgaagttcttacccaagatcttcttgatattagcagcgttccaaggaccgtccaaaatagcttgtgcgttacccttcttcaattggttcaaagcgtttgaagtttgcattacgcccttgttcttcttttgagctgcgtaccacttcaaagcattaataccgttttgtgagttgaaagttgagcccttaaggtcttcaccattcttaccgtaaagtgtagtacctgctgagaacattactggccacattacgtaagcgttagtaaagtcggtagctacaacaccctttgaagttaaagtcttccagtccttaacgtcgttagctgataacttagacttgttgtagtaaatggtttgagcttgttgtgcgtatgggaatgcgtaaaccttgcccttccaagttacaccctttgaagcaacatcgacatagttgtcttggatatccttagttgctgatggtgaaagtgggttaatgtaaccagcttcagccatttgacctaattgatcgttaggaacttcaaagacatcagcagcctttgatgggtccttaccaacgtctgtcttagcgttagctgaaccgttaggactttgaactacacgaaccttaatattcttgttcttcttagtaaagtccttagcaatttgcttgtagtaaggaacttgttcagtatccacccaaagagtcaagttagccttcttgtttgaattactgctacttgatgatgaattacttgagccgtttgaacatgctgctaatgataatgcagcaagaacagcagtactacctaaagccattttcttccaaatcttcatgactttttcctcctaaaaaatcaaaacaataaacaattcttaacaacagtagcttctgctacatatggttgtaagcttaattaataattatctgtactgcgttttcagtaccagattagttaacaatcgccttggtggaatctttatcaaagaagtgagctttgttaacatccaagcccatcttaaccttgtcacctggcttgtgataatcacgtgaatttacaatagcagtaaattcagtaccatcaacttcttggtgaagctgaatagttgcacccaaaagttctgaaacaacaacatttgattcaattactgaatctggccaggtttccataaatgcttcttctgagtgaatgtcttctggacgaataccaaagactaagtctttgtcgttgtagcctttttcttccagcagttttgccttaccttcaggaataccaatattcaagcctttgccatcagaaattcgaccgtccttgtagtgaacattgaagaaattcatttgtggggaaccaataaatccggcaacgaacatgttaactggcttgttgtaaacttcaagtggtgagccgatttgttcaactctaccaacagacattacaacaactctatcagccaaagtcatcgcttcagtctgatcgtgggtaacataaatagttgtagtacccaagtcttggtgaagcttagcaatttcagtacgcattaccacacgcaatttagcatccaagtttgataaaggttcatccatcaagaagataggtgccgcacgaacgattgcacgtcctaatgcaacacgctgtctttgaccaccggacaaagcacctggcttcttatccaagtactcttcaaggcctaacatcttagctgcttttttaaccttttgatcaatttcatctttaggcgtgtgacgcaactttaaaccgaaggccatgttgtcataaatggtcatgtgtggatataatgcgtagttctggaaaaccatcgcaatgtgtctgtcctttggagcaacatcgttcattactttatgatcgatttctaaggtacccttactgatgtcttccaaaccagcaaccattctcaaagtagttgacttaccacagccagatggaccaacgaaaacgatgaattccttatccttgatatgtaagtcaaagtcgttaacagaatatctgtcgttacctgcatattttttgtaaatatggtttaaatcaacctcaaccattgtttcccctactctctttaattatttttcattaaaaactttttcaatttcactcaatttcaactcagcagttgttggaacgatgtaatcagcttctttcaaaagctccttatcaccaattcctacggcaaattgacctgcagccttgattgcttcgactccagctttggcatcttcaaaactgattacttcatcagcctttaaccctgcaatttcttgcgctttgatgtaaatttcaggatctggcttaccatgatgaagtgttgctggatcaacaatgccatcaaattcatccataatacctaatctagttaaaatcttaggagcattcttagaagcagaagcaattaccatctttaagttttgcttcttagcatctgccaataactcagggatcccaggcaaaatgtcctttggcgtcattgtttctacttgttcaacaaatttagcgttcttttcagctgcgaacttttctttttctgcttcagtatatttgtcttcttgaccgccatattgcaagatcaagtttaatgaatccattcttgaaataccgcgtaagctatcgagctgagaatcagtaagtgtaatgcctaattctttagctaaattattccaagcagtcaaatgaaacttagctgaattagttaaaacaccatctaaatcaaacaataaacctttaagcattttgcgtttcaccttctttaagagtaagtttttggtctttaactacaacatctaaatcgtcacctttaagcaaggtaagttttgtttcattatgatcgacataaacttcgattaagcgaccacggtagttaatcttaaagccgtagtgatcccacttgtctggtacaaatgggttaaatttcaattgatcatgatcataacgcatccctgcaaaaccttgaacaattgctaaccatgaaccactcattgaagtgatgtgcaaaccatcaactgtatcgttgttgtagttatcaaggtcaaggcgagcagttctttcgtataattcgaccgccttcttttgcttgccaagttcagcagctaagattgagtggatacatggagaaagtgaactttcatgaacagtcattggttcgtagaagtcgtagtttctttccttttgttctttagtgtattgatcattcaagaagtagattccttgtaaaacatcggcttgcttgatgaatggtgaacgaaggatcttgtcccatgaccagtgttggttgattggacgctgatcttcaatttcgcttactggacgaaggttcttgtcaaggtagtcatcttgttgtaagaagatgccacgttccttgtcttctggtaagtaaatcttgtcaacgatgtcttgccacttcttcttttcttcatcagtaacattaaccctggcttgagcttccttagttgctaatggcaaacgctccaaagtgtacttaagtagccatcttgccatcgtactagtgaaccagttgttgttaacgttgttttcgtattcgtttggaccggttacgccatgcataacgtacttgttacgccacttggaccagtggactctagctgcccagaatcttgctgttccaaccaagacatccattccttcatccttaacgtatgaatcatcgccagtgtatgacgtatattgcttaatcgcaaatggaatatcagcattacggtgaatttcttcaaaggtgatttcccattcattgtgacattcaatcccgttgaaggtaaccattgggaacaatgcacctggtaagccttgttctttagcgttatggtatgcgcctggcaattgatcgtgacggtattgtaaaagtgcccgagtaacactaggatcagtaacacataagtacattggaacaatgtaagcttcagtatcccagtaagtagcaccaccgtatttttcaccggtaaaacctttaggaccaacgttaagacgttcatcttcaccgtaataagtcatgaataattgacaaatgttaaagcggataccttgttgagcggcatcatcaccagcaattacaacatctgatttgtcccagcgcttttgccaaacggcttcatgatcagctaagttttcttcaaaactcttagcttgaagcttggtcatcaattcagctgccttagcatcttgatcatctggtttgacgtcacgactagtaacaacaatgacatctttttcaagatcgtagctttcgccttcatttaactcaactgaaagcttttcatgaagttgggctgcttcagttgaaacatcacccttaactacttcaccattatgacgaagactttgcttaaggaggactgtaaattgtggaaccttgtatgggttagccttagtttcaaccttaatagttcttgcttcagcattttcacctaaaggcatccagaattttgcatcgtagttactgtcttcgttaacaacagttccatcaagtgctgcatcaaagtcgattttagctttaccacttaaaacggtagccttaactttaattaaagctgcttcttttaaggtaatatgtaaaaacctttcgaattcgaatttaaccttagtatccttaccttcataagtaaaacttctagtcagaagaccttggtgcatatcaagtgctaagtagaaatcactaaacttaactttagctaagtcaagtttttcaccattaatcgtaattcccatgttgatgaaacttggtgagttaggaaccttaccaaagtactttggatatccgttcttccaccaaccaacacgcgtcttatcagggaaccaaacaccagcaaggtaagtaccttgtaagctgtcacctgaatagccttcttcaaagtttcctctcatacccatgtaatcgttgccgattgcagtcatactttcttgcaatcttttatcttttggttcgaacttatgggtaacgaccttccaaggatcaatttcaaaaattcgtttcatatattctatctcccgtaatattcgaggttctctcttgtttacgctttcattatcctctagttgaaagcggtttacaatattaaatctgctgttaccgttatcaggattagttaatagaaaaagaaggtagatcttaatctgccttcttttttgcttattaaaagtaacttttaatgaacactcactacaaagccttttggtgccaattgattattctcataatcttgactaaacgtgttctcacaattgatctctactggatgatcggtcgtgttaaagtatgctttaattctttcattcccctcacgatcgacctcaattaacccattctctgttacgtgtaacttaattcgacctttaccgaaagtttcatcatgttgcaaacgaaagtcaatcaattgatgaactcgttgccaaaccgggccgtcttcttttgcccaatccattggtttacgacaatcaggatcgttgccaccagtcatacccatttcagttccataataaatgcatggactacccttttgcataaattcaaaagctaaggcttgcaaagccaaatcttggtctccattagctactgtcaaaattcgggctgtatcgtgtgaatcaagcatgttcatcatggctgcattggtagcatcccgatatttcatcaactggtctgtcaaacgactagttaattcttgtgctgacaacttgtgcttaaagaagtgatcctcaatttgcaaagtatatggataattcattacgccagtaaactcatcaccgttaagccatggacgagctgagtgccaaacttcacctacaatataaaaatctgatttaatatcagtaacgaccttgtggaatttcttccagaagtggtggtcaacttcgttagccacatctagccgccaagcatcaatatcgaagtattttacccaataagtggcaatttctaataagaaatcctgtacttctggattagctgtgttcaactttggcatatgcttttcaaaggcaaaagtatcgaacttaggactaccctcaccctttaatggatcgcggtaaggttcaactggatattcattaatgtggaaccaactagcaaaacgagaacttggaccatttttaacaacatcttgccattgcattgattgatcacccaggtggttgaaaaccgcgtccagcatgaccttcattccgcgggcatgagcttcattaacaactttcgcaaataaatccttgtcgccgaatgccggatcaacttgcaaatagtcaatcgtatcatatttatggttagaactggctttaaaaataggacagaaataaaggccattaacacccagtttcttcaagtaatctagatggtcaagcacgccttgcaggtcaccaccatagaagtcttcgcggccaggatgatcctccggattccacgctttaaccccttggggatcattagacttatcaccgtttgcaaaacgttctggaaagatttggtaccaaacagtatgcttaacccattctggcgttttcaccatatcaatttcatggcaatatggcactttgaaataagaaccatcttccataatggccttgtctacatcactgctaattgcacgatcacctacaactacactagtgccatcactgccaattacttcaaaggtatacttcaaacgatgatatggtgcttcaagcgtaatgccccaatgatcttcacactgccctacgccaattttttccatctcacatgttttagcctgttcaagtggcaaataattatcgcagtagtgaacaattacttttttaacgtcatttttagcactgtgaaaacgcacgcgaacatgacttggatcaactacaaaactatcttcactttcagttcggtgtcttaaagctgctaattgcatatattaattctcctttttcaacacaacacctgcataaggcatcaaagttaatttttcattagttaattgatattctcccgcttttagtgttgcaacagtataaccggctggtatttcaacagttgtcttttgatcactcaatgaaacagctacaatggcactttcatcatgtaaatcacgttgataaacatagctattcttatccgttgaaatcatataatacgttccagtctggaataaggcttcttttttgagttccagcagtttttggtaaaaattaaacatgctggtggtatcgttaatctcgttagctacgcaagcatcatcctgtttaatacctgttatccatggtttaacttcactaaaaccatggttctcagttgcatcccacggcattggaccacgggccggcaatttatgtgtttcactagccatagctaaggccgcatctttgctcaaaactttttctgcatcctttaaccatggcgctacaatttgatcttcgaattgatctgcactagtgaaatgtagattctttaaccctaattcttcaccgtaataaattactggaattccgcgttgcaaatacatcaacatcgccaagctcttagcctgagtttgtgtcttagctacgcgtgtagctaaacgagccatatcatgattattccaataaagagtaggctgcgatacgcctgctaatgtttgttgccaaactacttgattttgtttaaaggcagtcaaatctaatttcttaggctgatattgctctgaaaaacgttgatcacagttagaatcatcatcggtaaagtaccggaaggtaatcacactatccattaagtgattgcgcttagtcgtgtaatcaacagccaagttaacgctagcacttgcagcttcacctaataaaagcgtatctggataatcctgcttaatctgctcacagaaaggccgcatccattcctgcacctgtggtaagttagcgaaaaatggttccgcaacgattggcttgtttatgtccccatctccagttggataattttgtcgcaaatccgccttgccaatatggataaaagcgtctaaacgcaaaccatcaattcccttttttagccaatattcagctacctcaagcatggcgtgacgaacttcaggattcttccagtttaaatcaggcattcgcttatcaaataagtgaaagtatgattgaccggttccagctggatctggctcccaaacgctgccaccaaagaatgacccccaattgttcggccgcttgccgtcatgaccagcaaaaatatagtagtcacgatataggctgtcaggattcttgattgcgtcttggaaccaaggatgttgatcagatgtgtgattcaagacaaaatccatgatgaggtgaattcctgccttgtgcagatccttgattaagttctccatatcttccattgttcccatgtgtggatcgatggcgaagtaatttgaaacgtcgtagccgttgtccacctgtggtgaaacaaacactgggttcagccaaacggcgtttacgcctagatttttcaagtaagggatgcgcttacgaataccgttaaggtcaccgaggccatcgccattgctatcttgaaaagacttaggataaatttgatatataattgcgtgatcgtaccaatgtgccataattaatttcctccacgcatagtgtaacggattaaagaaaccgttttcaacaccatatctactgttatcgatatcaaaaaagcacaactcgcttttgagttgtgccttttcttctattcaattactaacttttagttgtgcttacgtttccgatcaacaccaaagcctaaaagacctgcaattgaagctaatgctaaaccaataatagatgctctgttttgtttttcaccagtttgtggtaatgtcttggcattcttttcagcttgaacagcagtattattactgtttgcgcgcttaccatgaacattgctattgtagctgtgattttcactattcaatcctgcggcctgattattccctgaattatgcttagtctcggtccgaatattttgaccattatttttggctttatgatgatctgctttcttacccgaattatcatcttttccaggtgtcttatcagttggtttattatctgaaggtgtagtattacctccattatcagtcttaacaactggaacagtgattgatgaacttactgaagctgaggttggagcattgtaaccatctttgatcttatatccagctggcacaccgtttttaatggcacttgaaggatcaatagttgtaccttcagtacctggaatagtggttctgccaacttcattaccattttcatcacggtagataatggttacttggccttgttgtggagtaggaggcgtgatttcaccgccaccgtttttagtataagtaatagttacaacagcatccttagtatctgcagttggagttacttcagcaacactatcttgacttggagtaaatccagtaaaggctggagcagtaaaggctggccaagtgctggttgcgtccttgtcaatgataaacttatcgttttcaactttacctaattgccagtcaccgtaaactgttttgacatttggatcagttgaaacagtcttggtgcgaccgaaccatacaacttgagtagaagtatcagtcttacctgttacaggattcttaacgttgattgtacgagttggatgagcgtacatatcactgttttcgcctggcttgtttggattgattgttgggtcggttggctcagtagtcttagtgtaagcaactgttacattagcatttggagtgtcagcattgaccgtctttgcatcaacctttgttgcttcatgcccattaaccgtggacttgtaaccgtcaactggggtgacatcatattcttgccaactaccttcagaggcaccagttgacttccaagaattattatccttagtagcaactgtccattctgtccaagtaatattaccatcttgatccttggtgccagcattttggccttcaccaccacggacaaagtgaacattttgggtaatgatgtcggtagtaccatcagtcttataaatcgtgattgtccgagtgacatccttgttcatatctttgtcggatggattgtatggaactggggtgatgttgtcagactttaagtaagtgatatgaacagcagcaccatttactggttgaccattgttaagtgccgaagcgctagaaacagttgtagtcttagttccattaacatatgaatcataatctgaaatttgtggtgcattcattgagacaaattctggttgaccacctaaaacaaacttgtggttttggatagtgcctgcctgccaattacctgtacccgtaacttcaccagttaccaagtcttcaataccattgcggccaaattctactgattgagtgtcaatcttcttttcagcttcacccggtttagtttggtaaatatcacgagttactgtcttgaacatgtccttgtacttaggatcagttggatttacgcctggagtggttggagtgatgtccttagtaccatgttcaacaagaacttcaattgcacttggagcagtagtgttaactgtttcagctgatggataagtgtaactctttgaaattacccatttttctggaacattactatcaattgtattcttttgagcttctgcacttacaattgctggagtagttgaagtaaattgtcccttaattgcatccttagctgtaaaaatcacattacctttcgcatccttataaacaatgctttgagtaaagttttcaggtgttggagttgcagcttcaacattaattgttgcaggaacatcaagataagtaccatcactaaagttaattcttacagtacccttaacgccatttgcaatattcttagttgaaggctggccattttcagcccaggtcatagtgaatgtcttggcagaatcattggcttgtgctgaatcagatgaattagtgccaccccagccattttcaagactattaacattaatcaaagtcttaaattgatcttgacttaagttagaaatattttgattttgcttgaaagttaatgactgattagtagttgaaccatagaagttgaagtaagtgttcatccaactgtcttgagtagataaaccaatgtagccgaataaatcactgtcatcaaagctatagtttacacgccacttagagttacctggtaggctttcaccagatgaagtttgttccttagagttaggatttgctggatcatagagaatatcaccggtaccatttgtaatatcccaattgctatttggagttaagataccattacctgctttgacccagctatacttaataacatttgcatcaaagctatctgacggatcttgggcattcacatacttatcaccttgtaagttataagtagtaactgtcttgtagtcacttgctgcactacccttaccatcccagtcagttctgtagacaatttgttgaatcttagcgatattaggatcaagttcatgactatcagtggttctgtgaactgaaatagttggtgtgatgaagctcgtcatactttgattgccatagtaggtatgatgctctggatcattaccagttatcataactggagcagtaaccgtttgtgtatccttacctggaacactaactgtaactggaatcttgtagaaccctggtgttgcgtcttgccctggcttcaaagtaatcgtaccagtagttgaatctactgttgcccaagttggaacgttatcacctgctacaaatttagtaccatcaggctttggtacaccatttgttgtaacaactggatcagatgctgtgctccctttttcaacagtaactgtcttataacttggactatattcacctgctggcacagcattaattgcaccatctttggtttgaacgtctaagtaagttgggttaccttgagcatccttatcagtaaaggtaagtctaatagttgcctgagtatcaccagcctttggtgcacttgcccatgaagcagtgtactgaataccggcattatctaagttaaaagtatcaactaaatcattcttttgagcgtcggttaaatcttgacctacagtaaccttaaccgggttagttacatccttagcagtagcaccagcagctttaatcgtcattggattactgtcaacagtagtgtcaccaactttaactgatacagtaccagttaagtcttcacttgcagatggagtagttacaacagttgttggagcatcgcccttccaagtaatgattgcactagtcttatcaactggcgtgctggttaccttaccatcttcaccaacagtgtattgattaattgcactaactgcttgacctgcagtcaaattcattgaattatctgtagtttcatgagctttatcaaatgcacttggagcagttacaacttctagggcaccagtcttagtggggtcagttggatctggaatgatcttgccagtgtgagtagcattgccaacataaactggtacgtgaactgtatccttagtagtatctggatacgttacaacaactggaattgtagtcaagccagttggcgtttcagtcgttggggcaattgttaaccaaccagtattaggatctactgtagcaaatggtgtgttatcaccaacaattttatacttagtaccttctggagccttgctacctgggttgattgttacagcactgccttgtggagttgattcaggatatgaaggatcttctgacttagattcaccttgttttacgttcatcggatcatatgaaggttggtaaacatcagcatcagggttagtgatatttaatggaatattagcaaaatcaacggtaccgtcttggtaggttacctttgcccaagctgacttatcgctagtcttcaaattaccagttgggttagttggagcatcttgaccgctcattaaatcttgccattccgttgcgtcagtagctgcattgtaccaatctacatttttaatagcagaaagatctggtgttatggttccatcgctagtccgtaacccagaaataccgtccttggcagttaagtcatttaaggtttgtttagtattaccatcaatagtcttgactactggttgatattgaccagaatcagttggcttagctacttcttctaaagaactacccattgcaactctttgtggagtccaccagttgaagttattcaagagtcggtttaagtatggagtttcatattttacaccatcagctggttgaccttgagtaactgttccatcaataaactgaaaactattaaacccagcttggttttgagcaagatttacttgaccgtttgagtgtaaaaatttaatttcaccattcttattttgtcctagagtgttgccggcttgagtaaagccagaaattgcattatcaccccagttgttttgagtttcaatattattgagataccagtaatcagatgcacctgtgcctttatttccttcatcccattgagcaaatggcaatttaccacctgcactagtaatagttacattattatttttattttcaagacgaagtaaagtacctgtttgatttccggtacgctggaaatttacatacttagggttggtaatagtaacatggttatagctatcaccagttccaccaccccacatagttaccaagccatatttaggagtattagtgaagaaccctttcgtaactgaatttagaactggctgagcattatcttgtaagtcaagcgtcgcaccttcatggacattcaaatcccacttagagcttgaaccactgcctgaaccaaatgagattaatggtgtagtagattgattgttatcaccagtacgaacaattattaatttaccttgattatctaaaacattggaatcagcattagtaatattagcagcaaaaccaacacctaatgaaataggagcaaagtggtaaccatcataattagttccaccattggcaccactaccatcattactttgtttagtattgatgttaacaacaccagttttgccaatgtttaagttaccagcccaaatagccattgagtgaccatcagccatgttggcatttaaattaccgtcaacttggacagtaccagtaatagcgctgttgacaagcatccctttaacatctttagattggccatttaaggttacggttgcaccttgttgaacatcaattgctggagcagtatcatttgtttcatcttcaactttggcccgcaaaatattgccaccagcgttttgatcgttgttagtcttagctgaacttacgttaaagatagtgttagaaccatccgcaaaaataatgtgtgcagctgaaacagcacttgaataattagaaacttgattccctgctacattaacggcttcacaagtgatattgttattacccttgaaggttaccgtagtatacggattatcacctatttgttgagccatcgtggtgttataaaaagcaccatttttaacatcagcagttacattttcaaatgtaaccttgttgttagctaaaagatcagttcttatgtcgtttccacccatgtaaattgggctaaaggcaccaccataactagaccatgaattatcataaccatcagcgttaatggttaaattcttgaaagcaatatcccaaggattactatctttttgattgttagtagtaaagctaagataattagcaccaaagttaatagcgtgaccttgaccatcaatatctaatcctccagaaatatttgaaccagttaagttcatctttccagagttaactagtggttgcggacgattaataccgttaacatttgtacccttattagcgacagtaatgtcactagttaatttaattgtaccgatattatagtcgtttaaagcattaactaatccttgccagtccgctacttcttgtgattgagtaccacgtaaattttgttgagtggtagctgcaacttctctaggttgtgcagctaaatttgctccaagctcttttgcaacttcatctttggtcttcttagcactgatattattgtcttgctcatttccaagtgataaaacattaaccttaccacgcatggtgctagttaaatcgttttagttaataaaaaagtccaatcttgttagactcgacttgtaaatagtaataatagaaaagagtctgatctgattgaactgccttaagcttaagcgttttagccaccatttacaagttagttttaaagatttagtgataatttgtcggcactggtatcgtttgtatgcaccggctgagtttactcatcagcgaaatattgatcaaattaaaactacggacagtctgattttggctttacttatctggcaagctaagacaggaattgaatcacaaagaagattctgtgaatgtttcaattgtttatcacactcacgttttaatcggcgttcacgtcagctattgcaattgatttatcagatacggcaagaaatgaataaaaaggttgacctgaatggacatttcttgatcattgacagctttccggtacctgtttgccaaccaattcgcaactatcgtgctaaaatttttcgcggttatgccaacattggttataaggccaccaagaaaatttacttctatggtttcaaagttcatgccattgttagcgatgacggttccattcttgattatgtcgtaacaaaagcatcagttcatgatgccaaggagacagttgaactgctggaaaatgcccatccatctaattactatcttcttggcgacgaaggctatttaggcaaagaactgcatcaacagctaaaacaaatgggttatgaactttggacaccatatcgtaaaaatatgacaggagctaaaaagcacaatgatcatcaattgatggctattcgcagaacaattgaaagcgacttttcgcttctgacctattacaatgccgagaacaatcgagcacgtagtctgataggctttcaaagccggttggaaattgcaattttagcttataatttggcttattgtctagaaagatttaactagcaccacgcgtataattcttatgtttatggacagatcgcgtatttaactaaccgtgttatcgaggaagttcacgaaaaagagaaaattatttctgaaatgcaacacgaagcggaagggttgtctgaatataatctactcttcactatccctgaattcggtgttcgaactgttacttctttgatcggtgaattaggagatattcgtcttttccatagtagtaatgctcttaatgcctatatcaggattgatcttagacattattatgaatcaggtaactttgttgccactgatcatattagtaaacgtggtgatgcgattgcacgtaaaattctttttaaatccatccaaaacattgccgtggcaagtcattttcatcctaatcatattaatgatttctatcagaaaaggaaaagacaatcttctcagccagaaactaagaaaattgccattgccgcgatacaccgtcttctcagaacgatttatcatcttgtaaaatataatcaaccctataattatcaaatagctaaagtataatttaagattgattattactattattgtgcaacccatgaaaaataaatctagttcatgagcttgttttgttatactttaaatttaactttgagccattttaattatttaattaacttttctatccagctaaattccaaggaattcctttaatatccttgactattcgtagaaaaccaaaataagcactgatgttaaattcatcagtacttacaattgtagagtccctttgttcaacccgtattgataacgactgcttacaataataaaattaagaccactagaataacagcttatggttttcgcaactttgatcattcccgtatccgaagtctactagctctcaaatctcatggtaaaaactaagctaaaagaaaaggtcagctcaagcagcttcgctacttaaactaacctcatcaaaatacctcatcagtactgacaaaggggtaaaattgtagagctaatttgattacttgcgcttcttgtttacagcagcaaggccaaacattcccaataaggtggaggcacctaagcccattaatgttaagctattgtcattaccagtttgtggtagttggttatccttagctgtcgttggttgagacgtaatcgtcttcccagtttgcatgttaggaacattaccttctagtttgccagtaacagcatttccattaggagtagtgtttgtaggcgtattagtagctggtgttccttgtccttgatgatcattagttgttggttgaccgccattagttgggatcaaccaacaactaatgatttgattagggttaccatccttgaaggtgtaagatgttggaacactttcaccaggaactaattgataaccatcaggaatgtgaatattaactggaactgtctgaccagacttgccaggattgtccggaagcttatcgcttggtgtctttggatcagttgttgttgtctctggcgttttgggatcagttggatctgtgtccttagtgtaaacaaaagttgtggtgtattggtatacagtatactggccactcgttactccaagagtacgaacaagacgataacctttaattttcttaggttggacttgccatggaccatttgcataccagcctttttgcggattaaccccattatttttttggttaggattatctaggttgaacgcaagcgtatcattattcctaagcacatttccttgctcatcaatgtacctcacagttactggtttgtttggtagcaagtaaacatgtatccccttagcgtaccaattgaaataatcagaattaagatatgtccctgtacttcctatataggagtaaccttgtttttcgtaatggctaatctcctcactcatttttttctcataattaccattgtttaggtcaatccttttgccatagctaccagcaatcgtaaagaatttgtacggtagatttgtttcttctggaacaagtaacaattcagtcctattactatcagaattattttttataaccttcttatacttgaaagttaaataaacatagttaggatcagctaacgaatttcgagtttgaccagtgattttaccctttaaaacaggttcagaaactaatttatatccaggaatattaatggctgcggcttcatagcgtgatgcatccggtgctttcttatcaccagcacggtgttgtggagattcaggggccatccagaaactatctagaacgattgatgctaaaatatgcccgttatctacatcaacatactctactttgattggtgacaatgatgcgtaatctaaattaatgttaatgtcttgcgtagtaatacctttcttaaggcaggcattaccttgtttatcaaaatagaaatacttattcaaaacttctgaattcattaatttataaccggccacagtaaattcttgatccacactatcccctggtcgaattgtggtctgcttgaaaggttgtttgaatacataatgaccattactaatcacttgaattggcttatgtagggtgacatcgcgaaaattcatagtaatgttgtacttactgggcagtggttgttttgctgttgttttatttggaactaatgttgatgaagtttgatgaccaaccgtatttgattcgtcgctaatccgaatattgcttgaatgggcactaacttgtggatcagtcacttgagtcgtggatgtattttgagcagcaactgtcgtattatctgccttggcattaccactaataatgaaggttaagcccaacgaaactgtcaaatcttttgtgtaaatagttctttctcgtaaattgattttttaattatttatttaatcaaagtaggattctaaggtgtcctgaacctgaccaaagcctttatgaattcgattgaaataacggtcattgtagctcattgcctgaataccaataaaagcatcaagcgactgttcagttggaaactctgccttaggcttagctttgcgcttgatcacattgttaaatgattcaatcatgttagtcgaataaattgaagctctgatctgcttgggatagttataaaagaccggcagatctggttctatgtctttcaagcttctgataacatggctgtaaaccttgccccatttggtatagaagtcatgcaggacagctgtggcttcttctttgtttgtctgttgatgcacctgtttgaattcgttcatgatcttttcacgatcgtcgacgcgtactttagcgcagatattacgcatgacatgaactaaacagcgttgaaaatgagcttttggataagtctgagctaaggctgttttcatgccaacaacaccatcagaaagaaaaagctcaacttgctttaagcctcgggatttcatgttttgaagcatatctgtccagacttcaatgttctcgctaggcgcaatgcagtagtcaatgacctccttgtgcccattaggcttgatgccaatggcaatatagactgcttcgcgctcaaatgtttctcggcgcaaaggaaggtatgtcgcatccaaatagacgcagaaaaacttgtcgcttagcttgcgtttgtggtaagcctcaacctttggaatcatctgcttggaaatatttgatacctgagctggactgtaatggctgccatacatcttttcaattagatcggctatttccctggtggtcacgcccttggagtaaagcttgataatcatgctttccaagatatccgagtgctgcttgtagtcaggcagcgtgtgctgatgaaattgaccgttgcgatcccgaggcacttgcacttcaattgggccaaattgcgtatcaactttgcggaaataagcaccatttctagagttgccagtattccagccatttctggcatagggatcatagcccagaaaggcagtcaattcagcttctagcaagttattaacagcctgttgtagttctttgcgcaataaatcatttattttgtctggattgaatagagcttgagcaaaatctttggtaaaatcattcatgaaggagttcttctttctgtatgtgttttttttgttcaaaccaatcatacgagaaaggaactcctttttctaatgtttaaagaaataaatttaaggaatcattcatccttacacaaactattttacagtctcaaatcaagctcaagtcctgtcactattgagctttcttagacgtaattagtttttatatgatctgtttcagtgcaatttgtatgaatcgtggcagttggttaataaagtcattgattacttcatctatcttttcaaaactattctgtttaagctcttttaattctgaaattaagtagaccaatgcatctacgaatctaatatcaggtaaggattcgttcattagatagaataaatctccgattgtcttatcatctgtattttgtctttcctgccaggtcaatagatcataagttattgctgtaactgcgatatagccacattggccatcatagctttgaacttgagatttatctaaagcaagatattgcttagacgtcttaaaatatgtttcaatttgccatctacgaccataaagttggatgatttcttcagggctaagctttgtctgagtagtagctaaaaccaaatacttgttcttgtttccacggttggagacaaagacgagctttaataaaaagctatgtccatgatattgagcctcaactatgcttgaataaagataatgtttctttttacggatgtttgaagcagccaaacgatcatacaagtctttaacgctatagcggcgatggcgataaatgtaataaatctttgaactcttcttgatcatgccaagtccatctaaaccgatcttctttaaaatccaaaacattcttggagaagaaaaccaagaatcgaataagacgtatttagcttctactcctaatcgtaaggcttgtctaatcaactctacagttacatcattcatctttctctgagcttgatttctccttttaccagaaattgaacgttcatcagcagtaatgggagcagctccaatcatatttttcttggttttggttgacatcaaggcaaagttaaccggcaagaaggtattgccatcgctccagcctaaagttaaaccacgatatccgttcaaatactcatgcttgtcatggtcatagactttagctagcaattcggtctttttagaaaaagaccgagccatcagcgtatcgtcaacgataaaagcaagtcggcgtcttttatcgataaatggttttaagcagccaatgagccgggctgcaatcaagcataatagtttttgccagttgattcttccatcgttaagtacattgcgagcagttctaacggaaaaacgtttgtcatccttagctctgaataaagaaagccgagcaaaatgtactgacatcagccaagagataatcatggttaatgaaacggtggatttacgcttaaaattgacttgtttagttaacttagctagaccaattagattaataaatcccggatttaaaattgaagtgcaacactaagtgttaaacaaaaaggccatgaagacctaaacttgaagtgacgaaaaatcaagaaaggaagatcttcatgaccaattcaaattctagcatttctaagcactatcatcaattaaccagcgtacaacgtggacaaattcaagcaatgctggattccggcataacttcccgtactgttatcgctcaagaagttggctgccataagtcgacaatcagtcgcgaaatcaaacgcggaagcgtcctgcaaagagacagcagctatttattgtatgagcactattacgctgatactgcacagatttattatgagaagcgtcgcaaaaactgctatcagcgcaatccattgaagcattatgctgtctttttgagaatgctctccagacgctttaaagctaaatttgatgccaccagcatcgatgagttcgttggtgaattcaaaaggactatgccaggctacccttgtcccagcacaccaaccgtctatcgctatattgatcagggcttgctggacataagcaatattgatctgcctatgaagctcaaaagacgcaggaacaagcgtcatcacagccatggcggtcacgctttgcacaagaagcatcttggcaattccattgaacagcgtcctaaggaggttgaagacagaaaagctccgctgcactgggaaggagatctggttaaaggcgtcagacgcaagaatcagcctgctttaatgactttgactgaaagaaccacacgctttgaagtagttatcaagattcctgactatcgggcaagcacatgccaaaggctgcttcaaaaggagattgacagacatcctgcctggtttaaatcaatcacgtttgacaatggctctgagtttgcggatatgaccaagatcaagggctgccagatttactttgctcacccatattctccatgggaaaggggcaccaatgagaactgcaatggtcttttgcgtcaattcttccctaagggcaagagcatgaaagacaagtcaaaagcttatgttcaacaggcaactgatgccattaaccacaaatatcgccgaatcctccaatatcacacagcagaggaactcttcaagcaatatatctcttcataacctaactgttgcacttaatttgacaattcaggtagattaataaatgaagaaattaaggatttagtatcattttctgtgtcgatttgttctatactgttcattgcgcaggatctcctttactttttaggtcgacacttaaagtataacgcagagagatcctgcgtttttatttttgataagaaaaagccaagaggcgcggggaaggagcgttaatcttagctttcaagtttcagaaataattttaaaagcagttaaaaagcacctctgagttatcagacgtgctcgttatcttttcgatttatctagttgattggcgccgaatcagcttcggtttaagcattacttcaccttgaggtgaacctgattgggcaatcttttgcagtagcattttagctaacatttcacccatttcaaaaattggttgtttaattgtcgttagctttggattagaaacttgatctaaaaagacaccatcaaaaccaataactccaaagtcttccggaattcgagcgccttcatcttgcaattgccgtacaacacccactgcaattcgatcactggcacagacgaaacaagtatcttttttaaattccttaaaatgttcatgaatcacatcttgcgcagcatgactatgattagaaacccgaaaaatttgtggtatcaactggtgttgttgcaaagtgttgatataaccagcttcacgtgaatattcaaatggctcttttaaatcaattccaataaagataatgtgcttatataaccggtctaaagcatattgagtagccatcttctctgctaactgattatcagaatcaacaaagtcatagccgcggtgattttcaccaaataaaacaaaaggcttatcgagtttatcaaataattcataatctttgtttcgcgccccggtaattaaatagccatctgcatgttccttttcaatttgattaggatccgtaactaattgcatcgcatactgcttagtatttaaaccacgagcaaaaccaaaaagcaagttcatatagtatggctcagtggtatcaatatcttctaaagtgacgaattttaccacgttagtccgattattaactaaagcctgtgcaattgaattgggatggtagtttagtttctccattgctttttctaccattgctcttaattctggcgttacttgctcaggatgattaatcactcttgataccgtcatttttgatacatttgcttctttagcaacatctgataaagtagtcatattattcctattctaagtacatctttctgaatcggtttaaatctttttggctaaagccaagctcttttttgaaaaatccatcaaaactgccccagccttggcgaatagtttccgtaattccacgaatagccggtccctctcccttggtaatattcattttagaaactaggctagcaatttcattatcatcggggaactgtttagccaaagcaaagtcatacaattcattggtcaatacgcgtggtgctagttaaatctttctagacaataagccaaattataagctaaaattgcaatttccaaccggctttgaaagcctatcagactacgtgctcgattgttctcggcattataataggtcagaagcgaaaagtcgctttcaattgttctgcgaatagccatcaattgatgatcattgtgctttttagctcctgtcatatttttacgatatggtgtccaaagttcataacccatttgttttagctgttgatgcagttctttgcctaaatagccttcgtcgccaagaagatagtaattagatggatgggcattttccagcagttcaactgtctccttggcatcatgaactgatgcttttgttacgacataatcaagaatgtaaccgtcatcgctaacaatggcatgaactttgaaaccatagaagtaaattttcttggtggccttataaccaatgttggcataaccgcgaaaaattttagcacgatagttgcgaattggttggcaaacaggtaccggaaagctgtcaatgatcaagaaatgtccattcaggtcaacctttttattcatttcttgccgtatctgataaatcaattgcaatagctgacgtgaacgccgattaaaacgtgagtgtgataaacaattgaaacattcacagaatcttctttgtgattcaattcctgtcttagcttgccagataagtaaagccaaaatcagactgtccgtagttttaatttgatcaatatttcgccgatgagtaaactcagccggtgcatacaaacgataccagtgccgacaaattatcactaaatctttaaaactaacttgtaaatggtggctaaaacgcttaagcttaaggcagttcaatcagatcagactcttttctattattactatttacaagtcgagtctaacaagattggacttttttattaactaaaacgatttaactagcaccatgcgtattggtcaataaataatcacgcgaaatggtgtcatcatcaacacctaatgcggtcaaaattaacgccgaagtcatgcctgttctatctttgcccgcactacaatgataaactaacgcatcttcttcaggtaattcaatcaattccgcaaaaattttagcaaattcatgttggctatgtgaattaagcaaaacctgttggtaaatttgaccaagccaattgtcacccatatcaggaatatgatggacaaagcgatataacttgttatcgcctttattttgcttgcggttttcagaataaatatgtgcatcaacaaaacggacatttgaccaaagcttgtcaggcgctgaattttgttcatatttagagcgtaaatcaacatctacggtaattcggcgttcaactaacttttcttgatcttccttcgacaaggagctaagtgaatcagaacgatatattttgttccactttacatgttgacccttgtcattttggtagccgccgatgtctctgaaattcagcggtccatccaaagctaatattcgatcatgcttcatttttccttgcctttcctcattaaagtgttaataccgtacttttattatatcattatcagtcatgtgcaaataaccgagcggcacgaattgctctttgccaacctgaataaagtttttcacgttcaactgcactcattttcggctcaaaggcctgtccaatcgtaaaggtatgctttaactcgtcaatatttttccaatagccaacggcaaggccagctaaaaaggctgcacccatgctggttgtttccagcgttttagcgcgttcaatttcaatccctaaaatgtcagcctgaaactgcatcaggtaattgttgttgctagcaccgccatcaacacgtaaagcaggaatttcaatgcctgaatcttgttgcatcgtatcaacaacgtcacgggtttgataagctaatgactgcaaagttgctttaattatatccttgtcagtagttccacgtgtaacaccgaagattgaaccacgagtctccgcatcccaatatggtgcgcctaacccagtgaaggcagggacaacgtaaacctcgttctctgatgtcgactcaagcgctgcttgttcagagtctggcgcatgcttaatcaacttcatcgaatcgcgtagccattgaattgcactaccagccacaaagattgatccttctaaagcataagtaatcttaccattaatgccataaccaatggtcgttaacagattattgttagagtctgttggcttgtcccctgtgttcatcacaataaaggcaccggtgccatatgtgtttttcaccattcctggtttcaaagctagttgaccaaataaggctgcctgttggtcaccggccatcccagcaattggcacttgtccaccaaagaacatatatgacgctgtttcaccataaatctctgaattcgagcgcacctcaggcaacatttgcttaggaatattgagcaaatgcaaaatatcgtcatcccacttgagcgtgtgaatattaaacagcatggtccgtgaagcattagtgtaatcagtcacgtgtttagcaccatcagttaacttccaaactagccaactatcaatcgtgccaaaaagcaactttccctgttcagctttttcttgcgcgccaggtacatgatcaagaatccagcgaatcttagttgcactgaagtatgggtcaataattaagcctgttttttgacgaatttcattactatagccttctttttttaatttttcagctaattctgttgtctgccgtgactgccaaactattgcatgataaattggctcacctgtatccttgtcccaaacaacggtcgtttcacgttggttggtaatgccaattgcggcaatttgattaggccaaatgcccgaattaataaaagcattggcaattgttgtttggaccgccatccagattttattagcgtcatgttcaacccagccaggctctgggaaatattggtgaaattctttttgggcagaagcaacttcacgtccatcatggtcaaaaataattgctctagtagaggtggttccttcatcgattgctaaaatatatttttctgtcacagttattctcttttctacaaaagcgctttcttataatattactgtttttctgatgcagattctagcagttaatgtaatagatacggtataatttttataaggattttttaaggagggcattttaatggaaaaaaatcaaaaaattgcggtaacaattgcgggtaacgatagcgacggcagcgcaggcatgccagcggatctgcattcattctacgcccgcggtgtttatggcatggggctgatgacagccgctgttgctggcaataccaaaggaatttttgcccaacaaattatgtcacttgattttattcaaaagcaatttgatgtactaaacgatgatttcaagattaatgcgactaagacggggatgctcgccaacaaagaaattatcgactgtgttgccgataatcttaaaaaatatgacatgggtaaaatcgtgctggatccggtcatcgttactaagcatggcgctaccctgcttgacgacgatgcttatcaaactttcttagacaaattattgccgctagctgatgtgattacgcctaacttttacgaacaaaaaaaactgaccggcttagaattaaataataaagaagaaattcacgccggggctaaaaaattgcaagcgatgggcgctaaaaatgttctgatgaaagggcgccacgattcagatacgcaaactacagtaaccgatatcttgttaactgaggacggtgaattccacgaatttactaagccattctttaaaaccgaccgcgtaaacggcactggtgatactttatccgccgtgattgcggcagaattagccaagggcaagtcagtgattgacgctgtaaaaattggtaaggactttacctatgacgctatttctcacccaattgatgttggctcaaaatggggcccaattaatcatttggctgcacaagaagaaaacgaataactataaaaaataccgaagctcagatttgaaacttcggtattttcgtgtctattttatcttctttaggcctactatttttcctgaatctagaacacttaccttcgttaattggttattattgtacttatatgatgtaccttcatccgaaagacgtcttgtgggtggtcatttgaccactctttttttacgcaaaaaaacagcaatgaaatcaatcattgctgctaatttgtttactttttctcaattacaaaataatatcctgctgtcaaaatttggacaattccttcaagtgcaatcgcccaatctgcaccgaaatgcgctacgatcagtccacctaaaaatgacccaatcggaatcatcgacgacaaaatagaatcgttaattgtttctactctacctaaaatatgtgggctaaaactctcttgcaccaacacttcaaagttaatattcatcatcacgatccataattcggacgtaaaaaacaaaatcaacaataaaagcggcatccctttgggaacaactggttcaaggacaattgctaaacctgataacgtgagacaaatgacgactaacctttcaattttgcttttatcaaaagttagtcgctgtaccagtacactgccaactaatccacctattgatgaagctaattctaagccaccataactaattgccgatttagtcaaatgttcagtcgcaaaatacggcaaacccacagatgaaatgccgtaaaaaagattagtcactgcaaaaggcatgatcaaccgtgctatcttgtcttcttgtttcaaattttgccagcctttaagcaaatcttgcccataattttctgtgaaatattcattcgacttatttggaagtaataatttcctaggcaatattagtcgtgtataaaaagctagggcgcttgcaaaaaatattgcagaaataattaccgtggagtcaaatgacatccaagtaatcaataacgttgccgctgcattcaaaaacaaatccagcgtcttataagtcatttggaaaacgccatttactttagttagcttcgcttttgaaacgatgactggcaaaattttttcttcagcaggataaatcaaagttgagccaatcgttgaaatgacgtatacccctagcaaaagccaaatcactaaatcgcgccacaacttaacttgaaacagcaacgtcgctataacgctggtcactatctgcattagagttacaagcgtaagcatctttttgatataaacacgatcaatcagcggcccgaagacgaacgacaacatttcaattgatgagtctgcaacaaagattaacgacaagataagcggcgaatgaaagcgtaccttgaaaaaccacaaaatcgccatataaaatagcgaatcggcgatattggttaacactcgtcctgctaataatcgtctgacattgacattttctttttcgattaagttaaacattttcccattccttttcacaacactattaatgccgctgaaagccagggaaaattactattcaattgtagttaaaactcccagaccttcagctaaaaatctgggttgagcctcaagtagcgtttgacgaatgaaagaaaataattcattcgcaaacttaaacctaaaatgtcacgcattttagtcctcgctttctgtgaaaattaagttaattatagcatggatagcgacttatcaataatagtcattctatccttatatttttcgtattttcattcaatttcaaatcatgacttatgataataaccaaattaacttgcgctatttcctgcaatagttttaatagatcactttgtaactcaggatagatatttgccaacggttcatctagtaaaaaacattgcgcgccagtttttaaaacagcagaatataactttactaactgtatttcacctgttgatagttcatttatctttctatctaaaatcttttcaattctaaattgtggcgaatcaaaaacttttgcaaaatacttgcttttataaacctgacttttatcagaatatgatcctaaatagtccctcactgaacaattaggaagtggtatatcttgaaataaacaacttatatttgattctctcagttttcttttattaattaaatcagcatctataccatttatggttatttttccttcctttttcggcgtgtataggccaattattgttctgagcaaagtagattttccaattccatttctgcccctcacaatataaaatcctggagtaacaaaattggcagaaaaatttgaggtgaataagggggttttttcatctaaataaatattaaaatcctgtacttgaatcaaatttattttagaaattatttttttaccatcttgttcattcttcatggttagtaaattgttgattctcatccacgctactttaaacgattcaaatttaaataagatagaaaaaatttcatcaacctgtcccaaaagttgattaaaatattgaaaaataattgaaaaggaaccgattgtcatcttgccggaaatcactgataaaccgccattaataaacaatactaattgaaaaataagttgcaaaacaatctcgctattagacatatgtcaactaccctagactgaagtctagggcttagtggctcgttagcttgcgctaaccagaacaccaacttgcttagatacggacttgacttaccagcaatagtcttttgactattgccgatagaggtcgtctaattaccaaagccttttgagtccgcgagttgctaacggactacagcctttctaggctgctttttttattttaggattctgccacttgcctaatcctttttctaagatgttcactgccgcattccaatcacgaatatggtgcgttcaacagattggacaagtccattcccgatctttaagcgttagtttcttataaccgttttgtcccataatactgccacaagcatgacagcgttgagtagtatatttaggatcaattgttagaaattctttgtcatatagatctgccttataagccagcatgttcaggaagctgcgccaaccaacatcagaaatagcttgagataaggcatgattctttaacaggtttctgcttcttagttcctcggtaactactaaatcgtggtttttgattagtgcagttgagagtacttgtaaaaagtcactacgctgtcttctaatcttgtcgtgcagtttagcaactattagacgctgtttttgatagttttttgctagccgcaaattgcgtccttcttttttagcccggcgctgccggcgagacaagacacgttgagcgtgagccagtttcttttgggttttgcggtaaaagcgtggattagcgaccattgatccgttagatgctgtcaagaaattatcaaggttgagatctattccaatttgactctgcgtcttaggcaaggctttaacaaaggcaatatcgctgcctaactgcattgataagtagaactgctcgtcagcggtctttttaatcgtgactgttccaatacgagttggaatatgattaagcaagcgctctttgattagttttctaaagccggcaatgcggacaattcccagcttaggcagtttaacgtgctgagcatcaataaacctagctgtcccgttatcaagaaaagcttctttttgcttaggatattgacagttggtctgatatgaccagtcgctgcgttttttatggaaagttgggattccatgaccaatcttacgatagttgttccaagctttctgatagttttgaatcgcattggcaagagcgagactatcaatttctttaacacgtaaaaagctataagcatcgcggatattcttaggcttagctaataacgagttattaatgactacttcttctgccagcttagtctcataattattaagaatagaaaagacaaaaggcattgcttgatattgtctaacagctaaatagtgcttagcatgataattgcttcgattgcgtcctacataagagttgtatacaaagcgttgcgcatcatagtttagtttaatgattttcttttgcttagaactaggataaaagcgaagcttaacgccaaagtgataggctaaactgctcattcttttcatgtgtttcacctccttctgtagattagatatttatattttacaggaaagccgaacatatgtctctatttttttgaataaaaaaagctgactgctaggtcagcttggccctatccatccccgcattaagatacggggatttccgggcattttcattaaattgagaagaaaatctcgcttagcaacgcctaaaagcgttcttttagtattgctccatctctcagtttcgattttctctcttcgattaccttttatttcaatatatctgcttaaccattcagtaaaaccagaaaagtactcattataagcttctttcaattttaaactaacttcaaaaatcttagatcgcaaaaataaatatatgagactatatgcaggtaacaggatcgctattaacaataaaaaaccagacccagccataaataaatatgtaaaaatcaaaattgaagaaagggcgattgaaataatttgatttattgtttggaataaaaaagtcaacacttcagtagtatcttcagtaattttatctgctgtttgaaccgaattcatctttgtaactgctagcgtatccttcacatacagttctttcattattacatcattaacttccatgtttatttctctaaatcttaaaatctgaattttgttcataaaatatgacaacaaaagtctgataagacttaaagtcgttattaatacaatactacgtacaaaagcagccctatcagccttatatactaaggaatttaacagtattccttctaagtaaacattaaaagtcaaaatgccagtactgataatattcattcctaatagaagccaatattcaattttatactttttatcaattttgctaaaaatcgtatgcatagtgtcacctaactctgactagcagtcaaaaatgttaaaatataatgaatataaaattagataaattttatattcttatttatcctatgtcaatactaaataaattgatttggttttactttcatgctgtatttgatattatgtagttactaactaccaaataactatctatcaactacagaaagagaaaaatatgactgaaaaagcagcaattaacatccgtgttaataaagaaactaagcaaaacgcagagaaagtattaaacaaactaggcatcccgatgtcagtcgcaattgatatgtacttacgacaaattgcattgactgacggcattccctttgatctatcttccaagaaaagaaaaaagaaaaatgatcacgaaacagcaatgatggtcgcagaagctacagctcaatatgaaatcgttaaatccaactgggaggataaattagctgagtttattcctgactggatgaacatgaataagatgactaaagaggagcttgaagcaaggttagctaagcatgcccaagatgcaagagatggtaaaagtgtcgagattagcaaaacttttagcgacctgaataaagaattaggaatttaaatttcatacaagaatatactgtcaaatcaagtcctaacgtatctgtagaacttaaagagatatatagctctatcttgcaattatctcgatctccaaaaactgctcgagattatgtaaaagatcttgaacaaactatgcaagcgttaaattattttccagaaagatatagaaaaactccttcaggaaaataccgacgagttaatttcaaaaaatacgctatattctactttatcgaaaacgatactgtacacattattgatgtcatactagcttcatcaagtacagtattcaaatattaatcctttgccccattctagctattaagctatactagacagaagaaattaaacaaattaagggacaataaaatgagcgataaattaattaaaattgcatacctctacgaagatttaatgaatacttacggtgactcaggcgatgttaaaatcttgagctttttgctaaagcgtgaaggctacgacactcaagtcgacaatatttcacttggcgatgacttcaatgcctttgactatgatttcgtcttcttcggcggtggtcaagactttgaacaaaccgttgtagccaaggatttaccacggcacaaagaaacacttgataaatacatcaacgatgacaaacctatgctctgcatttgtggtggttaccaactaatgggtagttactataagaccaactcaggtgtaacaattcctggcttagacattttgccacttcacactgtcttcaagagcgacaagcgaatgattggtgatacccgttacatgaccgaatggggcgaagttaaggcttttgaaaaccactctggtcaaacttacttcgacaacaaggacaagttgcatcccctcggcgacatgatcgaaggctacggcaacaacccacaagaccacgtcgaaggcctgcgctatcgcaactttattggttcatactcacatggtccactacttaaaaatactaatgtagctaatgccatcatgaaaatgattatcgcttggcaccaagaacgtgttagcgaagccgaaaaagtcacagaataaaaaagacccagtcagaatctctgactgggatttttcattatcaaattaatttaaaacacgtttagcagctgagggataaaagtaggcactgatagcctgctttctcaccccttgactaggagttgcagcgtgaacatattgtccatcaccaacataaataccaacatggtaaggagctgaggcagaaccccagaacaaccaatgtcattaagttaagacattgacaattaagggtgcttttttagagatcgaatcatttggattcgatctctttttttgtataaaataaaggcgaaaagaccagccttttcgcctatcttatatattatatattttaaaccttcaaaattattgccagaaagatggtgttaattatgaaagcccttcataagaatattctagaacgtcttgatcaaattatcaataatactggggatcatattcacgattttattaataatcctcatgcttttaccaggaaacgcactttagatgcagcgacagtccttaaaactacaattaacatgcaaggtcagaatttaaacagtgaactctttagagcttttggcgaagatgcaactaaaaagaacgataaagtagttagtacttctgcctatgttcaacgcaaaagccagctttctcctgcttgttttaaacatattctgactgtttttaatcaaaatctatttaatattcaactttttgatcatcactaccgtttgtttgccattgatggctctgactttaatcaaatctggaatccgaaatcgaataacattgtacaagcttcttctcataaaaagaaaccctattgtcaaattcacgttaatgccttatatgatctattgaataatacctaccaggattgtatttttcagcctaaatcagaaatggatgaacgcaaagcggctgttcaaatgcttaaagctttgaattgtggtccatatattgtaacaatggatcgtggctacactagtttcaatatgattgaaaactgcaatcgcctgcctaactgtcattacataatacgaactaaggctggacaaggcggagttaaagaaataacgacattgcctgatcaagaatgtgatcgtgagatttcctgcctggtaactacttctaactattactacatcacgcataaagccagtgagaatattcaccatgtccagcatcattatcgccaatatattaagtatcgctctaaaaatacccaggatctaagctgggattttggcgagttatgcacaataaaatttcgagcctgcaaatttagaattaatgatgccaaatcaggcaaagaagaatgggaagttgtgctaaccaatcttgatcgaaaaaattatccgctaaaaagaattaaagagctttatcatctgcgttggggtattgagacctccttcaagaaattgaagtattctttaggcagtgtacagttccattccaaacaagataaatttattgaaatggaaatttatgcccatatgattatgtttaatgcaatcagtcaaattgatgcacaggcctatattccgcaaaagcattgcaagtatcaatatgccatcaatttcaagcaatcatgcttgattattcagagcatgtatttggcttcttctttaacgcaagattttgaacggatccttattcagatcagctattataccattccaattagaccaggccgcaaggacaagagaaatattaagcccaaatcagctgtatattatttatatcgcgtagcttaaaaaagcagaatctgtgctatgccttatttgttgtacgaaaaaagcaccaatttaaccaattaaatgttaaatcagtgctttaaaagtctaatattaattgtcaatgtcttaacttaatgacattgccagaacaacaagtcgccttttttaagatgacttaatgatacgcgtttacctttagtaacttgaccataggtggttctaggtagtgtctttttagcagcctttttataaacgtattgagctaagcctgaacagtcaaaggctgaaggaccagtagccccataaacgtaactcttaccaacttgttctttagcaagttggactacggcgttacgtttttctgttttgctttgactagctgcttggacagtttgcgtttgaagtggaacattaatgaatgaaattcctgtaaaaaatactgacaaaactgtggcaaacttaactaaactacgtttaaaactcaatttatttctccttaacacttcttatctttcaatgttttctatattaccggagaaatattacagccttgttttaaaatgactactataaaattaagcaatgtaacaaaatctgctatttcttgtaaattttgcttaacttgaaaaacactataattttctatatgcttaatacattaatttaggagttttttattatgaataagatagatagttatgtacgccactttttaatactaatcgcactaattttagggctttcactcgtctcagaactgcgtgaaattattgcctatgactcatctacccttggtatcatctttttaactgctgcaattatttgtacttttgcttcaggaatcacattacaatttcataaactaaattggattacgatcattttaattctgattctttctacgattatgatcttattctggctcaaaacccacacttttggccttattgtcagcatttttatgatttacaatattattgtatttctggtttgtgctattaacctaatttttcaaaatgatgctgaatgattaaatcatatgcttaatcataggtaatacaatcccaattaccactaatccaccattaaacaaaaaacttattaatttcttttcaaaaaagtatttcttcataaaaaaagacctttctattatgaataatcaaatcttcgggctaaaattccgacaattacgaaaacaacaacatatcactttagccaaagcagcagctggtataacttcaagacagtctctaggtaactgggagactggcaaaggcgaattagcatttgagaaagttttactgctactaaaaaaaatcaacgtccagccaatagactttttagagagtagtataagtagttacctcaaacaaactacttcacaaatctctgcagcttatgttaacaaccaagttgataaattattgcattatgctaataagtatcttgacataagccatcgtaatcttacagacagagttagctttttacgagctgctgtggcatgcaattattacatggacctaacgagtatagatctaacaactagttctgataaactacggatcatctcccattttaataaaatcttgaatggagaagaaatctggaattttgaggatatttattttttaggaaatacacaaaatctgatgagtccacgtgacatttatagtttagcctattctttaaattattatcgtcaaaagcacaaaaacgataatagagaatggatcaatgccgtttataatactttgataaacgctgaatttgtacttataaaaacaaatattaaattggctactgatttagacttacttttaagacaaaagtgggatttaccagataattatgctttcgaaaaaattcgacaaaattttatgcatgaactgctaaaatatatttcaacccaagatgaaagtgcaataactcagcaacttcacattcttgaattagaacacctatctgatttaaaaactggttttgaaacagcatatgaacaagtaaataaaatacgcatggtgctagttaaatcgttttagttaataaaaaagtccaatcttgttagactcgacttgtaaatagtaataatagaaaagagtctgatctgattgaactgtcttaagcttaagcgttttagccaccatttacaagttagttttaaagatttagtgataatttgtcggcactggtatcgtttgtatgcaccggctgagtttactcatcggcgaaatattgatcaaattaaaactacggacagtctgattttggctttacttatctggcaagctaagacaggaattgaatcacaaagaagattctgtgaatgtttcaattgtttatcacactcacgttttaatcggcgttcacgtcagctattgcaattgatttatcagatacggcaagaaatgaataaaaaggttgacctgaatggacatttcttgatcattgacagctttccggtacctgtttgccaaccaattcgcaactatcgtgctaaaatttttcgcggttatgccaacattggttataaggccaccaagaaaatttacttctatggtttcaaagttcatgccattgttagcgatgacggttacattcttgattatgtcgtaacaaaagcatcagttcatgatgccaaggagacagttgaactgctggaaaatgcccatccatctaattactatcttcttggcgacgaaggctatttaggcaaagaactgcatcaacagctaaaacaaatgggttatgaactttggacaccatatcgtaaaaatatgacaggagctaaaaagcacaatgatcatcaattgatggctattcgcagaacaattgaaagcgacttttcgcttctgacctattacaatgccgagaacaatcgagcacgtagtctgataggctttcaaagccggttggaaattgcaattttagcttataatttggcttattgtctagaaagatttaactagcaccacgcgtataaaatatattttcaataaactctcctcctagttagtaatattatcttatttctaatattgttagcgctttttgccaatattttagcatttttctttttacaaatattagccatgatattttatattcgtaaactaattaagattttttgaggaggatataaagatgaaaaaatcaattaaattagttaatgtactttctgttagtgtactgactttaggacttgtagcacctgtaaccacagtttctgctgatactgctaattctgagaatatcgcagtaaaaacaaacaatgaatcaacacaaagtacagatacatctggcttagaaatctatgatcaatacgttcaagtaaatcctgaaaaaaatcaattcgaattatccaaattaggtgaaaaggttttaccaactactgtatcatcacagattcagagtcaattaaatgctaccaataaagaaattaaggctaataattttattattgaccctgaaaccaaagcaattgtaaaatactcaccttatattaactttgctgctagcgttagtggcgctgcgcgcttaagaagcggatgttatgttcgatggttctggtggggctttagattctactttacttcaaatgcagcagtaacttggtttagagggattttaggtggcgcttctagtggagccaccataggaaacttagtagctgctgcaacgggccatgctatggctgcaactacaatagaagcatttggtatgtacgctgatagtatgtctagagatttgtatgattataataaaaaacaccgtcgtagtaaagtatatatggatctgaatggtgtatttcaatattcatttcatacattctaaaacatttggagaaataacatggggattaaaactttagtatccgtcattttaatcattatagtcattgtactagcctgctcaccattttataaaaaatatcaattattctatttaaacaaagtaggctattgggatatcctaatccaattcctagtaattgcaggtatcaacttcttcatcggtttaaaatatggtctgggtgccctgtttttattgattgttcccgttccactagacattattttcttaatctcaatgatttattcttaccttaaaattagaaaaatgaaacgcaaatagctcttaaaaaacgaagcaaattattgcttcgttttttgattgatcttatttttcttctgtttcggcgttagattcaaagccatcgcagccacgacaaccaacactgatccgacccaatccatcggcatcattactaacccaaagaaaaggacagaaccaactgtagctgaaaatggttcaaaagcatctaataaacttacagttgatggaattacataccgcagcgcgtttgccataatttgaaatggaataatcgttccaattacaataactgccgcagtatacagccaaacttcaggcttattgggaactgcatgaaattgcggatcaattatcaacaaactgattccagcaaaaatcatcccccaacctgttactaccatactagaaacctttttaacaatgttaaccggaatcaaagtataagcagcctcaccaaaagcagacaaaacgccccaaaacagtgcaactggcgtaatggccaaatgattaaattgcccatgcgttgacaataaaaacactcctaaaaaagcacataacgccgctatgatatccaatctacgcataacttgcttgtgcgtgatagctaaatatcccaatacaaaaaatggcccaataaattgcaagattgtcgcaatcgaagcattagccacttgaatacacataaaataaaatagctgcactggcaataatccaaatatgccataggctataataaccaaaacattgtgcttatttttcaacgtagctattggtttttgctttaaaaatcctgaggcaattaataaaactgctcctgaaataatcaaccgaatttgtgttaaccacattggtgtaatcttcggactaatatcaaacaatcctttagcgaataatcctgacacaccccacattacagctgccattgctgctagaaatgtccacaatcttcgtgtttttgctggtaccatctcgttcacctttttctttctcattcacctaataattaaaccacaaaaataaggatacctactgggcatcctcaactttattgatgagtttttttaactttctttttcttaggtgaaatattcaaggccatagctgccagcacaactaaaatcgaaccaatccagtccattggggtcatcaccaaaccaaagcaaataactgaaccaacggttgcagaaaaaggctcaaaagcatctagcaaacttgccgttgatgccttgataaagcgcagcgaattagtcatcaattggaatggaatcagggttccaatcacaatcactgccaccacatctagccatatatgtggcgtattcggaatatgcggcatctgtgggtgcacaatcattaggcaaattcccgctgacagcaatccccaacctgtaacgactaaactagaaactcgcttcaacacactgattggaattaatgtattggtcgcaactccaacagctgaaagcaaaccccagaatagaacgctaggcgttaaagcaaagtgattaaaacgcccatgtgtcgccagcaatactacgccaataaaggcacagatggcagcaagcacatctattcgccgcattacttgcttatgcgttacagctaggtagcccattacaaaaaagggaccaacaaattgtaaaatcgtggcaatcgaagcattagcttgttgtactacaataaagtaaaacaattggactggtaataaaccaaaaatcccatatgcgataatcgtccacgcgtcatgcttatttttcattgtagcgattggcttttgctttaatacggcagctacaattaacaaaataatgcctgaagttaccattctaatctgtgatagccacattggtgtaatctcaggactagtattaaatagactcttagcaaatagacctgatattccccacattacgcaagctaatccagctaaaaaggcccacaggcgccgttgtttttgtgtaaccattctttttaatccccaacttttctaaaactaacatactctatcataacaaaaacgggctagcttgaactagtccgttaattttttattcatcgtttttcttaattgggtttctgctaggcattagctgcatgaatgtagcaacaataattaaaaagccaccaagcatgtccattgggccaaagtccgcatgaagcagtgaaactgacaggatcgttgcaatcagtggctcgagggctccaagcatccctaccgtacttggttcaatatactgcacactagataagtacattgtataagctaacaatgttccaccaataataatataaacaattacccaaacatcaactggtgcaagttttggcattggttgagtgaagtaaattggtaaaaaggcaatgcctgcaaccaacattgctgcgccgattactggaatcggcccatactttttgaataatttcccaggtaatactgtattaatcgcttcagaaaaagccgcaattaagccccagaaacaagcaagcggtgataaagcaagttgatcgaatctgccacctgtagccaagatgaaggttcccacaactgctaccacaattgaaatcgcatcaattcttcgtggccacatcttacttctcaatgaagaatatataattatgaaaactggcgctaaaaattgaatcaccgtcgctgtcggagcattgctgtacttgactgctacaaagtacgataattgtgagctccccattcctaagaaagcaaaaatgatcaacataatgattacttttttatcatgtagcattgccttgacttggtccaagtatttccaacaagcataaatcataagcagggcgcctgaaaaaagcaaacgcagacctacaagccaagcagtatttacattagtgctagaaaataaaaattcaaccgccgtacccgatgcaccccaaaaacaggcaccgacaacagctaaagtcaatcctttataacgctgattcacattcacacatcctttagattaatgtttttcattgtaacatgggctaaaggaaaagttcaatgcttctaaagttgatttaatctatataacgtataacctgacacgctagccaataagccgattgtaaaaagcaaccaagattctggatgaaaggcaattaaaacaagtgaaagaaagcctgctgctaaactagaattgcgttccattcgctttttgccaaaaagcagaccgcacataatgccaaacatagttagcacataaaatgagtcaactaacagtaacaaattctcaataattgctagatcacttggctttacttttacactcaaatcagtaaaaatctgagcacagccaaaaaataccatcacaaatgcagctaagatcgtgataaagctaatcgtacgaaaaactgacttcaccttttgagttggcgtttcatcgataaaggtttttaagaaaaactcgtgatctttttttgctactacagctctgcccgtcttcttgtcataccagttcaatagaccagaaccaattagcataatagcaatcacagcaaactggatgacaattaaacgcatgaaaattggaaaggcatagattaccgtcaataacaaaattactatatagatcagctctgcataaagaaagaaatgcagacgctgtttatttttgaaaatagtttggaatgtttttgaattaggatcttgcataagacttctccccactaaatcttattacgaaaactcaaccagaaatttgccccactgagaatcaagccaataacagtggctacttgcatgcttggctgcatgaaaagcaagatcagtgataaaacaacagttaaaacgctagacgcacgaattaatttacgatttccacctaaaataccgacctccacacaaaagagtaaaacaacatataggccatcaccaatcagccaaacattttcaaagagattggcaaaattaccggtaagcggcttagccaaaatgtcagtccaaagctgacgtgcaaaagcaatacttaaaccgatatttgcccaaaagagcaagaattcaaataagcgaagaaatacgtttttagtaaatctaatactagtcagtgtttcccagaatgtatcgtgttttttaatcactatccttcgatcaagaaaggcaccaattgaataataaatcagaattgcaatcccttgaaatgcaatcaaatgcataaaaactttaaagtcaaacatcaatgtgaatagtaaaactactacataagctaactcaaaatataatacacagcgactaaactttcgctcgctaagccagtgcttcaattctcttttattcatatgatcactaatattgccattcatattttcactctcttttaataattatctaattatgtaaaaattgtataatgatttcaaaattttgtctagtccttttataattgatttagtaaatatttttcgaggtaaattatgaattatcccattttaattactattttgatcttcttgctgtgctttggccgattcatttggatcattactcacgaacgtcgttccttacgcgctggagttagcttagttatcaccttatttagttttttatttttaggtgtagtcattctggttaatatcgctgaccttgatccacattacaaagactggattttgccattatttgtgattgcgctatttgctgtgatggctggaacgattatctttgcattaactttgatcattatgtttttctacgatggcattaaaatcattatcaaagaaggaaaccgctggacaaattatctttctctgggcatggggatttccattatcttcttcctatttttatatcctcttgtgggacgaattagtcatgatagctggttaaagtatccttatatttttctatggctagtcatcatctacttagtcactatcatgatgatgtatactttaacttcttggattaatttaattaattggcacatgccgcacttagactacatcgtagtgttaggcgctggcattatgggaacaaaggtaacaccacttctggcagcaagaatttcccggggaatagaaatttatcacaaaaatcctggctctaagttaatcatgtctggtggccaaggacctggtgaagacattcctgaagcagttgctatggctgaatatgctgaaaaactgggtattaataaaaacgatattattatcgaaaataaatccaaaactacccagcagaacttgcaattctcacatgcactgatgaaaccaaatagtcgcttctgtattgtaaccagctcctaccacgtgtatcgcgctctggttttagctaaacgtcaaggactcaagtgtactggttatggtgccaaaactaagtggtattttactttaaatgcttttgtgcgtgaattcattgcatatctggtaattactaagaaaatgcaattgactatcatcggttttctagcagctatcatgattgctgctgccgcatttcatttttaatttattgcgttaagttgagaaacttagcgttttttattgatttatcttttaatttttttataattatagtcaaatctatagaaagcaaggtgtaactatgaggattcgtaaaaacaacttgtcaaactgtcattagtcaggatgacgagtcctgactttttcaaaaaagcaggttacttatgtcagaaacaaaattcaataaaactcttcttagtgtcagtcatgtggatttttcctaccctaagcgcaatttattcaccgatctaaatttttctattgctaatggtgaacgtgttgctctagttgggcctaatggaattggtaaatctacactaattgacctaattcgtaagcaaatccaaccagatgatggacagattatttgtcacggtgaaattaattatgtacctcaagtcaatgatcaaactgtaattaatgactcaaagagcgctggtgaaaagcgattagctttaattgaaaatactatttggcttcctagttctcttctcttattggacgagccgacagtttacttagatgacacaaatatccagaatttactctacttactcaagaattatgatggagcaattctagtagctagccatgatctggattttatcaaccaactatgtgagagaactattattctgcagccaaataatgcagtttattacccaggaaattacgcacagtatctcgaacaaaaacaattagataaacaagccgtatacaattttaacgaaaagcgagatatattaaagcaacaaattactgaaaaagtctctactttaaagcaaaaaagtactgactataatcattttgctaaaacacaagacaatactggtcgctatccttcgcgaagccatgatcatgtccaaaaaggattaaatagtcggcttaagcgagctgaacgtgaactggctaaacttccagagaaacagcacctatatcaacatcaacttaaacttcctgaatttaaaaagtggccgactaaaatacataattactctatcaaaatagatcaattactcagtccccaaaataagactttattatctaatacacagttaaacttgcaaacagccgatattattggattaatcggccccaacggctgcggtaaaacaacattgctcaaatatttagaacactacattaatcagcagcaatctttgccaccagccagctacattggtttaaatacgactaaacaaaagaaacctgccacagtagcagatttctttcacgagactattttgagcaaaactgaagttaagcgtcttttagttaaaatggatatgtttgtcgatttgactacaagactcacggatttgagtggtggcgaatttgctaaattagcattaatcaagcagctataccttgaacaagaatctattctattacttgatgagccgactaactatcttgatccagaaagtgtgacggccttggcccaaatgctaaaacagtcgcatctcacttgtattattgcatcccacaattgcaaatttttaacccaattttgccaacaaatctataaaattaagcagcaaagactaattgaattgcactaaagcatttctcttaaacacatatttgctaagcatatcctttactatcctcatctatattaatgaagatcacatttggtgctgcagaagtttggtgcgtttctttattatatttaccaccataatactcataacgaggtttccccttgccaaaaggatctattcggcaaagaaagatcacatatgtcgctttgaattctttttccggagagccacctagcccgccatagattatttcttcctgataagcgttggcaacttccagaatgttttctcctggttcttgcgaccctacttgaatgattaacccgtatttattgcgcctcttgtctcgcgcaattacatgtacgattgctttttcatctaagacatttctatttggatcatcaagtgattttgcttcctgaatattgagttcgggaagcattctttgtactgctgtaagaagctgctcattatacttcttcataattcctgcggccatgtgatccaccattgccggtgacatttcattttctaacataaaaaaatcctcatttctaaaaatctgagagttttatccctctattacttattacgcaaaaaaacgcaaaaattttttcggaaatgaagttttttcaattttttagttttcttttctaaaaaatggactgagtagcgatacaagcaggccgtaaataaaataccagcgataaatatctgccaagtcttgattttgaatccacaaaattattgcaattactgtcagtaagccacctaaaaagattgttgaacccatatttttatcagtaaagaagctgatagcagcacctaaggtaattaacgctaccaaactataaatgacgataatcactggtcctttagtctgaacgttaacatcaagcattggtgcgttagtaaacagctgccacacgataaaaccagctaatgcaatgccacatagcaatactagtaatctaaaaacaaaagttaaagtctttttcattatttttctcctgtatgcataataatactagtataacagcaatatcgcggcatacgaaaaacgcttggatttttccaaacgcttttttactattcttttgcttgcataaattgttttctagtgatgtatttgattgatttaacgtattgccccttgtgttgaattgaaatatattggcctgatggatcgtagccgccaacctttttcaacaataaattctttttcgtcttaggattatacgccttcacattgtaataccgctgtgtgcctttatctacttgagcatagcttgtttcctgggaaatgaatggattcaatctatcagtaaaagagttatgaaatgaaaaaatgcagattactcccactactagcactagtgccgttacaaatgcggttttaatagtacttttattcataatattcaccttcatcgttcaactattgttatactaaaatagtacaccaattcagttactttaacaattgtttctagcaaaaaaacgcttgaaaaattccaagcgtctttcacctaagccaaaaatctttttatagcttcttctacactagcattcaatgattggtgcttcgttgcagcataattagccaatttttcatgtaatgaaggatcaatgcgcacattaaaattacctttaaaaggtttctctggtataactccatcttccttacagctcattagataatcatcaatggctccttgaaaatccttctccaattcatctattgtattaccttcgtaagaaataagactcttaatcccctgaaccttaccaaaaagaatcttatcctccaaagtatattcaattgaaccttcataacctttatacttcatatattgattagtttttttcatctttattcatctctttgattttatcttgaatttgtttgatttgatatggtaatagttcttttctaggatgtggtttatgaagaatgatccgatcactgccctttttaaaaataattctagatccactcgtttttcctttattatcgagttgataatctagttcatgcaatagtgttttagcatctttaaagtcaaacgttctgagactgtaaaatagtttgtgtaaggatgaatgattccttaaatttatttctttaaacattagaaaaaggagttcctttctcgtatgattggtttgaacaaaaaaacacatacagaaagaagaactccttcatgaatgattttaccaaagattttgctcaagctctattcaatccagacaaaataaatgatttattgcgcaaagaactacaacaggctgttaataacttgctagaagctgaattgactgcctttctgggctatgatccctatgccagaaatggctggaatactggcaactctagaaatggtgcttatttccgcaaagttgatacgcaatttggcccaattgaagtgcaagtgcctcgggatcgcaacggtcaatttcatcagcacacgctgcctgactacaagcagcactcggatatcttggaaagcatgattatcaagctttactccaagggcgtgaccaccagggaaatagccgatctaattgaaaagatgtatggcagccattacagtccagctcaggtatcaaatatttccaagcagatgattccaaaggttgaggcttaccacaaacgcaagctaagcgacaagtttttctgcgtctatttggatgcgacataccttcctttgcgccgagaaacatttgagcgtgaagcagtctatattgccattggcatcaagcctaatgggcacaaggaggtcattgactactgcattgcgcctagcgagaacattgaagtctggacagatatgcttcaaaacatgaaatcccgaggcttaaagcaagttgagctttttctttctgatggtgttgttggcatgaaaacagccttagctcagacttatccaaaagctcattttcaacgctgtttggttcatgtcatgcgcaatatctgcgctaaagtacgcgtcgacgatcgtgaaaagatcatgaacgaattcaaacaggtgcatcaacagacaaacaaagaagaagccacagctgtcctgcatgacttctataccaaatggggcaaggtttacagccatgttatcagaagcttgaaagacatagaaccagatctgctggtcttttataactatcccaagcagatcagagcttcaatttattcgactaacatgattgaatcatttaacaatgtgatcaagcgcaaagctaagcctaaggcagagtttccaactgaacagtcgcttgatgcatttattggcatccaggcaatgagctacaatgaccgttatttcaatcgaattcataaaggctttggtcaggttcaggacaccttagaatcctactttgattaaataaataattaaaaaatcaatttacgagaaagaactatttacacaaaagatttgacagtttcaacgttcttggatgactatataactttattaatagcttttctaatttactcacgttatcctcacttaagtatataatataatatatcatttgtaactaaatttgcaactaagacaaattatacctaattcgctaaattcacgctactaaaaaagcgcttggaaaattccaaacgcttcttttgtttaatcatctagacctaacttcttaaagatatcatcaacatgacgcaaatgatagtgataatcaaatgcatcatcaatatcttccttggataggtaattcataatttcactgttttcaaccaatggcttaaactgcttttgctcattccatgatttagcagttagcttctgtaccatatcataagctttttcacgagatagacctgcttcatcgatcaacttaagcaacactcgttgagagtaaattaatccatatgtacgatccatattcttaagcatcgtttcagggaatacatctaagttagtcaaaattcgattgaagcggtgcaacatatagtcgacgccaatagtcgtatcaggcaagataactcgttcggcacttgaatgagaaatatcacgttcatgccataacgctacatcctcgtatgctgtaacgacatgtccacgcattactcgagccattccacagaggttttcagatccgatcgggttacgtttgtgtggcattgcagatgatcccttttggccagcgcggaaatgttcctcaacttcatgaatttcactgcgctgcaagccacgaatttctgtcgcccaattttcaatactagtagcaatcaatgctaatgtcgcaatgtattctgcatgcaaatcacgaggcaatacttgactagtaattggctgttgtgtcaaacctaattgcttcattacgctagtttcaactgcaggtggaacattagcaaaagtaccaacagcacccgaaattttgccagattcaacgccttttgcggcatgttcaaatcgttcaatatcacgattaatttctgcgtaccagcgagcaatcttgagaccaaatgtagttggttcagcctgaacgccatgtgtacgtcccatttctactgtgtacttatactttttagccttttctgcaatagttgcttttaattcgtgcagatcttttctgataatctcatcagcttgtttaagtaagtagccttgagcagtatcaaccacatcagttgaagtcaaaccaaagtgcacccattttttctcagggccaaggctttcagacacagttctagtaaaagcaaccacgtcatggtgggttacttgctcaagctcagccacacgctctgcagtaaagctggcattcttagcaatcttctccgcatctgcttctggcacttcaccgagttctgcccaagcctttgttgcggcaatttctacttcaagccaagctgcatatttattttcgtctgtccaaattttccccatttctgggcgagcataacgttcaagcataaattacatttcccatggattcttcaaaacaatagtttgttcacgatctggaccaactgaaacagttaccaaaggaacgccaaccaactctgaaacgcggttcaagaatttcttagcattttctggaagagcgtcccaagtcttaacttgagtaatatcttcatcccaagctggaagttcttcatatacaggcttacatctgtataattccttcaaacttgctggataataatcaatcttttcaccatcaagttcatatgcagtacaaatcttgatcttgtcaaaacctgaaaatacatcaagcaagttcaagctaaggccattgataccagcaacacgctttgagtgacgcaatgcaacggagtcaaaccaaccaacacgacgtggacgaccagtaacagtaccatattcatgagcagtttcacgaatacggtcaccaacttcatcaagcaattcagttgggaaaggacctgcaccaacacgagtagtgtaagccttgcagacaccaattacagtatcaagacgattagcacctataccaatacctgaacaaataccaccagaaatagtattagatgaggttacaaatggataagtaccttcatcaatatcaagcatcacaccttgcgcaccttcaaataaaactttcttattttggtcaagtgcatcattcactaagacagaagtatcagttacatacttcttcattctttgaccatattcatagtatttatcaaaaatgtcttcaaatttaagtgctggcttaccataaaccttagtaaataattcattctttacttcaaggttagcacgcaatttttcttcaaaggtgtctttttcaagcaaatcacaaacgcggattccaattcttgaagccttgtccatgtaagttggtccaataccattcttagtagtaccaatcttgttagcccccttagcttcttcttgatattcatcttgcttaatatcataaggcataatgatgtgggcacgattagaaattctcaagccactagtatcaatgccactcttttcaagattttctaattcgccaaacattacttctggattgattacgacaccattaccaataactgtattgtccttggctgcaaaaataccagaaggaattaaacgcatcttgaaagtttgaccattaatatcaatagtatgacctgcgttgttaccaccatttgaacgaactgcaactgcagcatccttactcaaaaagtcagtaatctttcccttaccttcatcgccccattggcttcctacgactgcgactgctgtcatttaaaattcacctcataaaaatctctataaatattacgtatgctagtctagcaattaatttacaaataatcaatataaaatccgaattattttatttttaaattatttcatagttcgatttttatattgacaaacacaaattattcccatatagtatgtctcggtcaacaaacaagattaaagggagcagttttaaaatgagtaactactttagtatggaagcctttgactatgatgatatccaacttgtacctaataagggtattatcaaaagccgtcgtgatgcagataccagtgtcaaattcggaaaccgaacatttaaaataccggttgttcctgccaatatggaaagtgtcattgatgataaccttgctatttggctagcccaaaacgattattattacgtaatgcatcgttttgaacccgaaaagaggatttccttcatcaaaatgatgcatcaaaaaggattattcgcatctatttcagttggcattaaagacagtgaatatgattttattgatgaattagtcaaggaaaaccttaaaccagaatatattactattgatgtagctcatggtcactccgtttacgtgattaagatgatcaagtatattaaggaaaaattacctgattcatttttaacagcgggcaatattgctacgccagaagccgtacgtgaactcgaaaatgcaggcgccgatgcaaccaaagttggtgtgggacctggtaaagcatgtattaccaaattgaagactggctttggtactggtggttggcaattagccgcattaagaatgtgcagtaaatctgcttctaagccattaattgccgacggtgggattcgtcataacggcgatatcgctaagtcaattcgttttggcgctaccatggttatgattggttcaatgctggccggtcatgaagaatcacctggtaatgtaatcaaaattaatggtaaaacttacaagcaatactggggctcagcctctgaggttcaaaaaggtgcttacaaaaatgtagaaggtaagcaaatgttagtgccataccgtggctcaattaaggatactttaaaagaaatgaaggaagacttgcagtcatccatctcatacgctggtggtcgcgatcttaattccattaagttagtcgactacgtaatcgttaaagacaatatttttgatggtgataagtaattttaataaaatttttgcatttttattattttcctgttaagaatattacgataatatagtattatctatcttttttcgatagaataatataagtcgagttattgtagggtagtcaataactcggctttttttgattattttttaaaaacgattggacagagttttaaattgtgttatactagttgtcgttgatgaatgcgcccttagcgcaactggatagagtgtctgactacgaatcagaaggttgaaggttcaaatccttcagggcgcacttaaaaacgggaaatggctcagtttggtagagcacctggtttgggaccagggggtcgcaggttcgaatcctgttttcccgataagttagccgcacttcattgaagtgcggtttttttgtgtaaaaaaataagtattccctcggaaatacttatcatgctatgcccctttagtagctcgtctaaagataatctgtgtatctgaatctacatatttcaataacggtaaatcgtaatccttaacctgggccaaaacatttactttctcattgcatggcaaatcgcgtttagtaatctcgatttcgccttcataacgcggatacaaatgattatcaatcgtcacgctgccagttggtctagcataaatattatcttgcggctctgttgacaaaaacatcttttttctgctttcctttaagcgaactacgtcacgcgccacatctggacgattatgccaatcattaccaaacaattctggtatatcagtatctaaatgcagtgtaattgcaccctgtttttgataattagtaatcgattcaattgcatccctcgtaagttgcggatctcccacaaaaatgtgatcgcaatcataatctttcaattctaagatcgcagctaatgggttttcatatcgctgcttctccaacgttggcaatcctgcaaaaattggtccacgcaatttgccatttcctgaaataaaggctgctgttttcaaaccatattgcttaagccactcattcttcttttgcatccagtgtgcatcaagacctgtttcaggacgtgggtagaagttatgtcctgctgttaatttttcaaaatttgcattgctataacgcagatcatcaatattttgttgcgtaataatgctggcatttagaactatcggcatttctttggacaacttggcaataatatcagtagaaaatccatgatctactctaagaccagttagactcaaacttttaatttgctcaacactattgacattaatacccaaatcttgcagatcatctgccgtgacatctgcaataattttcaagtctagtttttgacaccaattagttaagtccgccagccgatttaaaatcgtctcactatcagtatcaggtacagctagctgagtaaaaacgcaggtaaatccactattgcgcatcgtcagcaaataattgtaattctcggacgtcaaatcgtgtcctagataaacagaaaatcctaacattcttattcctctaaaattaattaatttcttttattatctatagcttaaacgctttcttaaatatcttactacattttttgcttgcttttttctaaaaaataatgttaaatacatataaacaaattaaaaagcgatgaaaaagacgagtaaataatctaattctttccagtgaattagtgctagtgtgaaactaatagaccctggattattgaaaaacacttttagcagctcactgaaacaataattcttagagtaggttgagacgtctccggtacgttaccacgccggtggagcatgatagtgcttcatgagtcggtctattaaaatatagacaatgtgggtggtaccgcggaaaaaagcctttcgtccctgtttttttagggagcgaagggctttttctttgctctaagtacattagaaagaggacttatattatgacacttattttacctaaagattatcacccaacattaactgtgcgcgacactgaagctgcgattgtatttattcgtgaaaccttccaagataaattggcagaaattctcggtttacaaagaatgtcagctccaatgtttgtcgaaaaaaagaccggcttaaacgacaacttaaatggtgttgagcgtcctgttgcctttgacatgaaggcaatgcctaaagaagatactatcgaagtagttcactcattggctaaatggaagagattggctttgaaacgctatggtttcggaatgcatgaaggactttacaccaacatgaacgccatccgccgggacgaagatcttgataacttccactccatctatgttgaccaatgggactgggaaaagattattagtaaacaagaacgcaacaccgacacacttgaagttactgtgatgaacatttttaaggcaattaaggcaactgaaaagctggttgctgcacgctacccaggctctacttatcgcctagctgatcacgtttcatttattactactcaagaattagaagatcgctggcctgatctttctccagaagagcgtgaagataagattgctaaagaagaaaaagccgtctttattatgaaaattggtgacaagttaaagcgtagtggtgaaccacacgatggccgtgcaccagactacgatgattggcaattaaacggtgacttagtcttctggtatgaaccgcttaacagtaagattgaaatctcttcaatggggatccgtgttagcgaagaaagtttgcgtgaacaattgaaaaaagctcactgtgaagaacgtgagaaattaccattccaccaaatgcttttgaagggtgaattaccttattcaatcggcggcggaatcggtcaatctcgtctctgtatgttgctgttaggtaaggctcacattggtgaagtacaagcttctatttggccagaagatatggttgaggcttgtgaagctgacgatattaagttgctgtaattttaagatttttttacataccaaaaaagatcctgcaaaatgtaggatcttttttctattgattttatttccgttctcttctagaaatccaagccataatcaatggcaacaatacaaagccaaagaccatcatcgcaatggcataccagttaacaccgataacttgccctgctgcgtttactacaccaaattgtgccttccagttatattcaactaacaagaagatcacaatcacaccagataaaattggcacaataacatcagtcataacgctcttattagcctttaagatatcttcttttgccttaccacggtaaaattgaataactgctagaggtaccacgatgaaacctaagaatctaaccatcgcgctcaaagtaatcaagttgaccatattgtattcaaaggccatcggaatcaaaattgccaagccaacagagataaagaaagttctaattgggaagttattcttagttctcttagttaaagcttgtgacatctgaccctcacgagccatagcttccagaatacgtggagcattaaagctggaagctacgttgatcccaaacattgaaaccaaggcaccaaccaagattacatcacgtaagatttcattattaaaaatagccgcaatcgctacaacttgcttagttgtcattaaagcacgtggattaagtaccatcgctaccgctacaacgccgatatagacaaccgcaataattaagattgccaatggaattgctcgtggcaagttcttttcagggttcttcatatcttctgaaccagaagctactgattcaaagccggtaaaggcatagaaggctgaaacaattgacatgacaaaggtagttgtagttaaagttggcacaattttctgaccattctgagtcaattgatctacttgccctaggttgcttgatgcaccagtagtaattaacaaaactactccagcaataataattaataccaatgcagccaacttaccgatagtagctaaattcattacatacttaactactttttgaccaaacaagttgatcacggtaataattgccatcaagatcaaaaagccaattgtgacatttattgccttattgggatttccgccaaaaattgaaatagttgacttaattaccccaacagccattacgccccaagctacactggctgagaagtaacgcagaactcccatataaaagccaatttttttaccaaaagcggccttggaataagcataggcagcaccagatttagtgacatactttgaagctgccgcaaacgaaatggccagaatcgctgcaaaaattgccgcaattaaatatacaactaaagctttactaccggcttgctgtaccacactaccaggtgttaaaaaaatacctgaaccaataatggcattaatcgctaacagcacaattgaccaaaagcctaatttatctcctgttttttcagtcatctatttgcttccttactttgcattatcaacaacaaacttaaataagttattcataaacgctacatcggaattacggtgcaacatttcagggtgccactgcacggcaatgacattaccttgtttattttctagcccttcaaccacaccatcaggagctgttgccactgcttttaaatctggtgcaacgtctttaattaattgatggtggaaagaattaacgcgaaattcagttttgcccaaaatttcagccaatttactatcagcttccacttccatactatgagtaggcaaagttggcgtatgaccttgcatgtgtttcaaagtaagttcttttctgtatgaaagatcttggtaaagcgtaccgccatgagccacattaataatttgagcaccacgacaaatgccaagtaccggaataccattttcttctgctaactttaacaagcgcatatcaaaatgatcgcgttcaggccaagtagcaccaatcttttgcattggctcctcaccataaaaacgtggatcaacatcatgcccaccagataagatcaagccttgaacatgattaagctgttcacgaatcacctcatcattttcagtaaatggaataatgtaaggcacaccgccattttgaactactgaatctacatagtcttcgttcacataactacgatggtatcctgggaaaattcctctatcgtcaataattacagaacctgagataccgataattggttttgtcatttatgctcctccttctgcttactttttgtatgtaatattatagagaaatttatgcaaaaagtacaattaaaaaattgcattgttgtctataatttttgcatatctttaaatatagtaaaaaacagcaagccttatttttagctcactgttttatgctatttataccaaattccaaaaaggatttccattacatgctaaatatgtttctagccactgtttaaaagagaaatcaaaatattgttcctctattccaggatacgttagataggactgtttttgattgtagcgatctaaattaatgcccatttctccctcgtctcttaaccaaagtataggtagataattaggtgttttaactaactgatttaagacatactcaatagtgtaaattctacaccttgctccacctaattcgatgccttgaaaagaatcaatgaataattctgcaccgttagcctgtatccaaaactctatcaaatcatttgggacagatatgcctgacaacctatttattttattttcagctactggcggatttaatttaaatttacagtaatagacgccaccaaaaccaaatattggtacgtcgacactgcattttttactaatcaaatttatattatctattatattatccattttaataattaataaaccatttagttataagcttatgtgcttcaattggtactggcattaagttgtcaaagtcattatttccaccataaattctaggtcttatatgatgaacttgattttcagcccaatactcttttgattgattgccataacgctcactaaactcttttatatagtaatatctatccatcgtagtccatactggtgaagaaggaagtctagaccaagtagtattgattggtgtttctgcatcttttttagagacaggatcaacatattcaggaaaattttgaccaattttattttgtaaataaatagaactaagtgaaattggataagtagcgctatttccattatagcctaccattccccatgctcctccaacagcaaaaaatgttgtagcagctggaaatacagcagaccctaacaaaccagtagtaatattgccttcttttacaattggactagctgtatttgtagtaattgggccggacaatgatggttcactatagaattgcaattgaactgaaattgcagcaggagctggaccagttattgaatcaatataaaaattgattttaaattgtccatctacatactcttgtgaagtatgaaatttaacaactgtatctggaatctctgccaaaaaagtatatgcagagtaatggctacttgttgcattaaaattattatgaatttttacagttccattttttaaaatagggacatctttttttacattttcattctttaacttatcttgagctaaagaatgaaaattttgttcattagctattttagcaacattcttatttacatcatttagcgagtcagcctttgcatttgtattgatagctataaagcacacgatagtggctaaaaaagcaaataactttctgtatttcatgtttctttcctcattatctataatttttaacacaattataaggatctttctattattctaccatacaactctatcacataagcaagtgctcccacactgtagcatcagatgctactgggatttacactctagattgatgtatacgaagaacacaattacaatcagaataacatgaaatactactatagcgacaatttaaaatatacagtaaaatctttaaactgtatttcttattctaacccttgttcaaagcgatactgccgtaatacatattccttgaaaaacggtaaagtaaaggccacttcaccataattagtagatttgataacttgatcatctaacaagcgtctacgatagttagcaacaaaattgcttggacggtttaacctttcatgaatttctttaattgaaacacaatgttttgggctctgagccatagctaaaacaaattttcggtcttgctttgacaaactactaagtactttggtataaacattttgctttagcaccaataagtactctgatttaatacattctaaagtgttttgatctattaccttactttttttagcagctttcaaaactaaataacctagcaactgaaaggcatatgaatagcccattgtcatcaacgccattttttcaagaatttttttcgacacttgataacctgattctttaaaaactttactatagctagcttcaacctgtgagagattcaatgctgataaagctattcgctttccacgtagtaagaatgaagttatattttcgtttttcaattcagagatattttcagaaagaccagctatcattaaggctataggataaccctgccgatttaataattgataacatcttgcaaaatctttcaactcctgacatagttttacttcgtctaaggtaatcaacactttaacgtcattttttcttacttcatcaaacatgttcgttaaaatatcttgatatgttaacttactaacgtctgtagaaagcgataatccaaaattagagaaatttagtccttcaatagatttaaatgatttttttagttttgaatctgcattcagatataagctattaataaaagaaggcaacaacttcatccccatggccaaattaacaacaatccaatctggatatgcactaatctttctgtccattgctgtcaaaaagacagttttgcctattccacgcattccataaacaatcgaaattgtatatgaactatttaaattctctattccttgagacacatcagcaattagtttttttcgctgcaaatacactgctggaattcggccaaagctaggattaaacggattatccatattttgtccccaatcattttcttatcaaaaaagcagcaggcttcttacctactactcaattttatttatctttttgatgcttaaccacataaatcagtgccgcaataatcaacactgctgcaccaaccgctactgaaatttgcgtctccggattaatgaacatgaagacaacaattactaccagcataatcaaagcaaagtaatttgaatatggataaagcggcaatttaaacgggtgattctccatcaagtgtggattctttcgtctaaagcgtaactctgctagcaggatcacaaaccaagctaccatccctggcaaaacagatgaactatagacaataacaaaaacattagccaatgatttattcaaaaattgggctaacacattaagcataaaaccaacgaaaattccactggtaattccaatgatcgcatgactaggcacgattctcttagatacgtgaccaaaagtcttaggtgcttcaccttcgtgtgccaatttatacaacattcgacttgatgaataaattcctgagtttgcaccggacaaagctgcagtcaaaactacaaagttaattactgaagctgccgcggtaattcccaccttggcaaaggtcgttacaaacggtgagccaatgctatctaatttattccatggataaattgtgacaatcacaaaaattgccccaacataaaagatcaaaatccgccacaatactgacttcacgcttttaacaatggccttatgcggatcagatacttcaccggctgaaatcccaattagctcaattccttcataagaaccaacaataatggccattgagaaaaagaagcccttgagaccaccagtgaagaagccgccatgactccacaggttagaaaagcctactggatgaccgccattaccaaagccaaatagaattaccgcaaagccaagtaaaatcattaagataatcgttacaaccttgatcatggcaaaccagaattccaaggttgcataagctttcgcactagctaagttagccaccagcaaaaataaaataataattacgccggcaacccaatcagaggtgcctttccaccaaaagcgcaaatactctgttgttgccaccacctcagaaattccgacaacaatgtattgaaacacgtttgcccattcggctaaatagccggcaattggatgcacatgctctgaagcatagtctgcaaaagaaccagtacctggatcaacataaagcatctcacctaatgcccgcattacgatatacaaaataaccccaacaaaaatataagctagcagtactgaaggaccggtccacttaatggttgagctagcccccatgaatagtccaacaccaattgctcctccaagtgagatcatttccatctgtccggctgtcatcgaccgctttaattcaggtgctttcttcgccatttccaactccctttctttagcatctgtaaaaatttcctaggaaatatatctattctcatttatctttaatcactataccttatcattttttcgaacaaaactgtagctgatcgctaaaaagattgcaaataaaatcgaaataatcaaagccagctgcgttgatttgataaagaataataagattaaaataccaatgtaaaaggcaagcgtaagccagctagttactgggtagcccggcattttaaagctgcctaaattctgcttattctgtttgcgataaacaatatgtgctgccataatcatgatccaaacaatcacaaaacaaatcgttgaaacagttgagacaacggagaatatttctgctggcattaaatagtttaaggcaactactacaaataaaattaatgaagaggtcatcaaagcgttcattggaattgcttttttggtcaattcacctagtcttttaggtgcatggccgttacgtgctaatgaataaagtgatcgactagttgaaaagattgcactattagtcgctgacatagctgcagtcaaaacgacaaaatttaaaatccctgcagccgctgtaacaccgatgccggtaaagacctggacaaagggacttgaagtagttgtaatgtgattccatggataaacagacataattgccaacattgagcccacataaaaaaggccgattctaactggcaaagtgttaattgccttaggaatatccttttgcggattagctgtttcactagcagtttgacctacaatttctaccccaacaaaggcaaaaacaaccatttgaaatgataaaagaaagccccaaatcccagttgggaaaaagccaccatgattaactaaattagttagtgaaacataaccgccctttacatgcgtatgaagtaacaacattacagcaccggtaatgattaagactacaattgccattaccttaatcattgagaaccaactttccagttcaccaaataatccgacatttaccatgttaatcaacatcaataagatcacaattactaaagggccaacccattgcggtagccacggaaaccagtatcttaaataaattcctgtcgcagtcaaatcagccatagctaaactaagccagcaagcccagtacatccagcccgctacaaattcggcacgcttacctaaatattttttgattgactctaaaaatgaatgactatcaggatcggctaaaataagctctcctaaagcacgcatcataaaaaaggtgataatccctacgattaagtacgacaaaataattgaagggccagcactatgaatggctgaaccagaacctaagaataggccagtaccaatggctccccctattgcaatcattgttacgtgacgactcttaagcccgcgttttaatctcggcttctcatccataattactcacaccttcctcaaaataaaaaatggagcggcatgttttttaaatgaaacatgttgctccatcaagtttgctttttttgaattatatagtcttataccaattcatgcaattattttttatctaaaaaagatattcccttaggaatatcttcattattagtaaactttaaattggttcaacggccagtaacgtactttaactacgccaacgatactactacgcttaatggttccgatataacggctatccttagaaacgctccggtgatcacccattacgaaatatgttcctttcggaatgcgcccagtatcctgcacatatttaatctgcgctctagtaaagtattgctggtaagtccgcgcccgcatcagtgactgcatagtaaaattctgagtctcagaataaaatgtatctgagccattatcaattaacttcgttccttgtttcaaccaaggttgagcaatctttttattattaatgtagatttgattatttttgctgacgattttttcaccaggcaaaccaataacacgcttaatgtacaaagcacctggttcatctggtgctttaacaatcactacttcaccacgcttgatttgcgcatgacgctcagcgattagccgatcaccattttgaaaagtaggttgcatcgaaagacctgatactgtatcgttgctcaagacgaagtggaaaagcagcagataggcaccgatcaaaataacccagataattaagatatctaggaaaaacttaccccatgattctttttcttcttttttctcagccattatttttctccatttatctttttccacagtttacaactttatggagaaattgccaaattacaaaaaagaggtatttcctcggaaatacctcttttattattaatgactattaattagtcttcttttttgtcttcagttttagcttcgtctgaaacttctaccgttacacccttcttagcaagaacatgagacatcttcttcaagtaaatgttaatgatcttgcccatgtcttgttcagtaagtgagttgaatggaacgattgcgtccaaacggttcaagaattcaggtctgaagtagttttcaagggctgagattaacttgtcttggtcaaccttgccatcttcaagcaacttgtctgagaagccggcgtttgaagtcataatcaagatagtatccttgaatgaaacagttctaccttgtgcgtcagtcaaacgaccgtcatccataatttgcaataatgcgttgaagacttgtgggttagccttttcaatttcatcaaataaaattaatgagtatggttggtgacgaaccttttcagttaattgaccaccttcaccgtagccaacatagccaggtgctgaaccgatcaacttgttaactgccatttcgtcttggtattcactcatgtccaaacggattaagtgttccttgttaccaaataattgaattgccaattgtttagcaagttcagtcttaccaacaccagtaggtccagtgagtaagaatgaaccagtaggtctgtcgctgtctttgaaaatttgcttacgagcaatagcgtcagtaattacatcgatagctctgtcttgatcaataacattcttcttaagtttcttagctaagtccaagttcttttgagcttcatcagcgtgaagttcactcattgggatcttagtcttttgttcaataattgcgtagatgtctttttcagttacttctggagtattcttagaatctacattcttaagttgtttctcaagttcagcaatcttactcttaatttctgaagccttgtcgtaatcctctgccttagcagcttcagtcttcttagcttcaagagctgagatttggttctttaagctcttttcatcagttgattgtacaagcaatgccttcttagcaccagcttcatccatcaagtcgatagccttgtctggtaagtaacggccttgaatgtatctttctgataattcaacagctaatttaagactgtcgtcactgtattttacgtggtggtagtcttcgtacttcttctttaagccttccaaaatcttaacagctacatcagtagatggttctggaacttgaacagcttggaatctacgtgataaagctggatctttttcaattctttggaattcactagtagtagtagcaccaattaacttcaattgaccacttgccaaagctggcttcaagatgttagctgcatccccattgttgttttctgaatcagtagaaccagcaccaacgatgttgtgaatttcatcgatgaataaaacaatgttaggatcgctcttggccttgtcgataaccttctttaatctttcttcaaagctaccacgaagacttgaaccagcaaccatgtcattaatatttactgaaatgatatgcatgttagccattttagctggtacattacctgaagcaattctttcagctaaaccttctacaatagaagtcttaccaacaccagcaggtccgattaaaacaggattattcttcttacgtcttgaaagaatttcaattacgttatcaatctgttcgtcacgaccaattactgggtcaaatttattgttcttagcttcctcaactaagtcaacaccaattggcttttcattgggttgttgtgggttctgttgaattgtttgtggtgcagcacccatgctgctggagtaattaattggaattgaacctgaactgcctttgctatttcttctgctaccaaagtcgtcattaaagaatgagctattcaattcgttaaataagttatcaaaatcattgtcaaagtatgccatatgtgcaacactccctatctcaaatttacgtctttagcactctagcttatcgagtgctaactcattacatttaatagtatagcaggttatccacagactgcaagctaaaaaacaaaagttttacacattttcctttatttttgtgatttttatttaaaaaagcactacaaatgctgcaatataaacatttgtagtgcttcacaaattataaagaatttcttaagatgggcaaaaattgatgattattttgcttaaaactgttgaattttaaggaagttttccacagataagaataagtttattaccataaactatttctgcctacctctattattgcccttttgcttgtccagtattttgcggttcgctcaactttctcggcccaagaaaatactgtttaattactttgattacctgcttattctgaggtaaatccgagtgatccgcttctacacccgttactgtcattgcagtatagctcttgacttgattctgaaaaatatattttccggctgctacgctagcttctggtacaattccatcagactcataattttttccaccagataaggaataaacaatcaagtttttcggtagtttatctttgttcttgataaagttttctagcatttgcgttttatgattaatatttttttcaccaaaattatatggcgttcctagcgtcatcagacgtttgattttaatttcatcagaatagtaacagtagtaatgttctaaccaataggtccagatcaagccaccgttagaatgcccaaaggctttaaaattattaaacttatagctctctgataaggcataaaaggcttgatcaaaccagctggcttgcttcttaatattgctataaccatcgtgattattttcaaaaccgacaataatgaaaggttcgttgtcgtttttattaattttgcctgaatatgacagcgttccattcgttgaaactttaattttaagcacgctatgcttagtcggtgtgttctgatttagctgcttcactaattggttaaaacgttcagtcgttgcactagaacctggaatcataattactggtgacaaaagcgatttgcgtctttcagctctagcgtggttatcagccttcatccaagaataacccggaatagccaaagctactaataagactaagacgattgccaaccatttaaaattaggattttgaactaaattaatcatttttttcttcataatcctttagtcccctttcaagtcgcaaacctaatttcatagttggaataaacattattatatccaaaatgaataacaaaatagaaaataccaagttgctccaatcaccattggaaccaaagaaagagaccaaaattcctggtgtcccacttaaaacggggtaagcacaaggttgaattaaatggcaaaaaattgctccagcggctagtagaatattaataattggaataatcacaatcgccggcagtaacaatggatttaaaataatcggcatcccgaccatcatgcctccagttgagcccaaagctgctggaagcaggttaaccttggcaatattttcactatccttatttttactataaattaggataattacaatcatcgctaaaacaatactcgcaccacccatttctgcataaggataaaacaaagaactacccaaatacttatatggtacattccaagcactcccatgttttaaggcaaaatttaagttagctgctgctgaaatactattagaagtagttgacaaagaagctagaggataacctattcccatccagctaagtaaaaagactgggatagtcagtaaagctattaacaaaatattatttgattcctgtatttgagtaactaggcctttaaaagtactagaattcaagaatttgatttgaaattcataaattataatccccagaactatcccacaaaaaattgcaaatattgtcgggataaacgcattccaggctctttccttaattctagcggcatgttcaaaatcgactggcttgtgttcctttcctagccaatgaaaaatttgccctacaccatagccaattaacaaggccagcaagacagcattaatttttaaaacactggaagaaaatggtgaatgatcgctggcattattagctaaattattggcataagcacaaaacatgataacgatgacagccgtcatcccggccatggttgaatctttacggtataaacgcgcagtataacgtgccgcaaaataagccgcataaataccaaataagccgaaggttacccgaaccatcccccgactgacaaatgctcccgcataccaaaaacgatctggcaaagtgatatcaaaattaaaaatattgtaaataaaactatcgggcgaaaaaacggcatctctgaacaacttaaaatatgccccaattaccgcgatcggcatcagcataaccaacgttcgctgaaaaattctaaagattgccaatcttcttagtttaagaaagatatttgtgattctgtttaccatggtattttcctttacctatctattctaaatatgattgaataaagttaattaaaacaattattaattatacatctatactagaaagctgattatgatggcttacattaacttaaaaaataatactaaaatttaccaatctggtgacacaaccatctatgccaataagaacattactttttctatcgataaaggagaactagtcattattctcggctcatcaggagctgggaaatctactttgcttaatattttaggcggaatggaaccaaatacaagtggcgatgtaattgtagcgggaaaaaatattgcaaaatataacgctaaagaattaactacctatcggcgcaacgacgttggctttgtttttcaattttataatttgattcccaacttaacagcaaaagaaaacgttgaattagctgctcaaattgtccctgatgcgatgagcgccgatgatgccttgcagtatgttgacctagggcagcgagaaaacaattttcccgctcaactatcaggcggtgagcagcaacgtgtggcaattgcccgagccatcgctaaaaagccagccttacttttgtgcgatgagcccaccggtgcccttgactataaaacaggcaaacgaatcttaaaaattttgcaaaatatgagccggcaaaatggctcgacggtcttgattgtaactcataacgccgctattgccccaattgctgataaggtcatccgtattcacgatggaagtattcaaaaagtccagcataatctacatcccgctgatattagtacaattgaatggtaggtgggcgacatgcaaaaaactattctatggaaagatgcttggcaagcaatcacccattcacttgaccgttacattgccattattctattaattgcactggggacttttgcctttacaggtttaaaaatggctggtcctgatatgcgagcaacaggggcagaattttttgccaaacataacttagctgacgtcactgtcacttcaaactatggcattaattcaactgatcgccttactattcagaatttaccggaagtaaaagaagctacttttggctattttcaagatgttaaaattaaaaatcaacctgatacgctccgcatcttttctcaatcagataatctttcaagttatgaattgattaaaggtcattttcctaagaataaaacagagattgcactgtcatatttattgcagaaaaaatatcgcttggggcaaaacattacttttaataaacctggcattttaaaaaataagacttacaagattgttggcttcgtcaaagctagtgagttcttagataaaaatccaatcggtcaaaccaacattggcagtggccatttaactggaattgcggttgctaatcataacgccttcgccgcaccagtttatcaaattgcccgaatcattttcaaaaataccgccaatttaagtccctttggcatagcttaccgcaaccgtgtttataacgatcaaaccaaattgcaaactgctttaaaccaaaatcgagccgacaaatatgacaaatatcgggccatgtatcaaaagcaatatcgacaagctgcagctaaacaattacttaaacgtggcatcgtagttaacccggcgcaaatcaaagtaccacagaacaagcttaaaattgcttatcctaactacgtaatcaacagccgtgaagaaagtcagggttatgcttcttatcgagcagattctgaacgagttgaagttttggctaatgtctttcctgttttcttgtttgctgtagcggctttggtcagcttaactacaatgatgcgttttgttgaagaagaacggactaatattggtacgctaaaagcactaggctatggtaatggagcaattgccattaagttcttgctctatagcacctcagctgcaattttaggtgttattctgggggctagcttaggttacacctttttgcctaacttaatcatcaaggcctatttagctagctcaaccttaggaactgattaccagctgaattttgcttggggaccactattaatttcattgacgattgcactacttgcaacaaccgtcgtttcaatgattactttagctcaaactctgcgtgaacagccttcagctttacttttacctaaaccacctaaaaatggttcacgtattttactagaatatattccatttttatggaagcacatgagcttttcagctaaggtaacagcccgcaatattttccgttataagagcagaatgctgatgaccatcctaggcgttgctggttgtactggattactagtaatgggatttggtattcgtgattcactacacggaattggcaatattcaatattctgaagtacaaaaaaatgatgtcatcgctttgaaaaaccgccatgttaacacgactgagcgacaaaaattaaacaaaatttttaccagccatgatgttacgcaaactactgctgtacaatatcaacaattgactaaacaccttgatagcactggagcaactgaaaatgtaatgctaattgcgccacaatcaactaaaaactttagcaaatctatcaatttgcaagaacgtcaaagcaagaaaaaacttgttttgtcaaataatggtgtagtcatttcagaaaaattagctactatcttgcacgctcataaaggttcaacaatttccttaaaaaatgaacatgggaaactacttaagttcaaagttagtggaatctgcgaaatgtatctcggtcactatatctttatgagcccagctgaatatgccaaagaaactggcaaaaaatttactactaatgcctatttagtaaccatggccaaacattccccaggaaatatcagccatattagtcaaaaaatgatcaaaacaggcgcaatcgaaacggttgtctcaacttcatcaaatagaaaattgctgagcagtttcactggtagtctaaatgaagtcattctaatcctaattttaatttcagggatgttggccttagtagtcatctataacttaactaatatcaatgtcgctgaaagaattcgcgaattatcgaccatcaaagtgctaggattttacgataatgaaacaacgatgtacatttatcgcgaaacaatcatcttatcggcactaggaattatcgtaggctttggctttggttggtggctacaccactttattatcactagtttgccaccagatgtcgcgatgttcgatccgaatatgtacccgttgaacttcgtcttctctgcgctaattcccgctattatcaccgctattttagcaattgttgtccatcacaagatcaagcgaatcaacatactagatgccttgtcctccattgattaagcgctgttatgctataataatcactatagaaaagggtggaaaaaacatgccaagaaagcactttgaattaaacagtgatgttaataaattaatcgaaaaatatgatgaaattaataatgttgatttcaataagttagttaacaaggccttaagattctaccttgttaatcaaatgaactacaaagatgttcaagacgccctgaataaagctgataacgaagcttctaagtatattgatgaagcaatgcgttccagcatgggtgatattaatcgaaattattagaacataactaatcatggaaaaagccatctgttttgacagcaggtggcttttagtattcattacaagataatttattataaaaacaactaattgataatttctttactcaaaatgcttataccgataatatcgataacctatctttttaccaaaaatcgtctccgaagttttcatccaattagccagcaaaacataaatgcctaaaaagactaaaccgaagattgctaaataaccaaaactaccaacacggcctaagtcgttgaaacgatagccaaataaaatttggtaaacaaagagcaggataatgtaaatctcgtttgaaacaatgatcggcaacaaactccccatcttaacgccatatgtcttattaagcttgtgataactgagccaaattaccagtaagaatgaaatatcagttgaaagaattgcaccatccccattcatgaacatagtcatcggtacttgcaaaattatttttactaagacaccttcaaccatatagatcacagccagtttgttcatgttcaaagctaaaagcagtgttaatgaattcatcaccaaaccagcaaacaaactttgaacaatattttcaaccaaataatacgcacctaaactatcgtgtgagaacaagaccgtataaattggagaagccgcaaaagcaccaagtgcaacaaccggaagcaagacaaataatagtagtctatagttctctaaaagcagctttctaatgctttcttgactatcattagccttatacttaagccctgctaaaagcggcagactagtctcagaaacggctgtcgcaagtgaaataatcaccgtggtaatcttgcttggattagccgagaaaattgtgtacaagtaactaacatagcttttactcatatgactgaagctaatcaggatttgtttaaacaaaagttgatcaactaattgcgtaacagtaatgaacgatcccagcaaaacaaacggaattgaggcataccataagttaagcaaactacgagaaacattattaagtgctctgggctcgctattttcaattaattctcggtaatgtccccactgcttgcgcatatatgcaaaaagatacaggtaactagctatagcaccaacacaggcgccaaacacactgaaataaaccgccgttacgtaatcatgatggaagacttcaataatcaacaaagtagccagcaaaataaacaaaattcgagcaaattgttcccataattgggaaatcccatatggcttcatatcattatttccctgaaaccaacctcgaaccatactcattgatggcagaattactacggctggcactaatactcgaatagaaattgttgcactagccactgaatccactggactatttttggcaatcattggtgccgtcacataaagcaaaataccacacgctattcccatgaccagcataatagcgaagcctaatttggtaatgtacaaactgtctttatatctattttgcgaatttaattgcgatacttcccgggcaataactgaaggaagtcctgccgtcccaattgataaaaacagcgcatacggcgtatatgacgaattgaacagcgcctgtgcgtttaattggttgtggtagcttcccagcataattagccaaggaatcaaataaacaaccccgagaattctagatacaatgctaccaaacgatagccaaaatgaaccggataggatttttttattcaatagaatagcctcaaatctacgttagtttctcattgtgccttcttattatacgtggattttataactttgtgggaaatatgtaccaactagttacccttttttaacaaatttttcggctctaataatacaaatcagttacattatttactatattgttacccagcctttaattttacgttagaccccttgacctaaccttctttaattattatccttaaaatgtttctgttaaaggtcataattagacaaaaataataatgtattaagaatattcatcgggggaattaagttgtcattcaagaaaaagattatcactaaattagcttatgttgctatgctttcaactactggcgttgccgcagctgcaatcgtgcaaccacaagcacatgttcaagcttctaccacttcagttgctgctcgctcactcggaatcgatgttgctagttaccaaagtgctgatctttcagctcacgctaaaagcggtgctaagtttgctgttgttaaagtaagtgaaggtaccagctacagaaatcctaaggctagtgctcaaatcgctagtgcccgcgctaagaatatgatgccaatgggctaccactttgctacattttctgctaatagcgctgctgctaaaaatgaagccaactacgcaatcgcatcagctaaggctgttggtcttggtgctggctcataccttgcatgtgactatgagtcaggtgacggcaacaatatctatggtggtaagaatcctactgctaatgcaattaatgccttcatgagcaaggttaaagctgctggttacaagccacttctttacgctagttcatcagttttaagaaacaacattaacactaactctgttgttaacaaattccctaactcattatgggttgctgcatacgctgtttcaggtcgagtagacaatcctaactttgactacttcccatcaatgaagggtgtttcaatttggcaatttactgacaactggcgtggtcttaacgttgacggtaacattaacgttttacctcttacttcatcaggtagcgctgtttctcaagcacctaagaaggctcgcgtattaaagaagaaggctcatgtatataacaaggctggtcaccgtacaggcaagactattaagaagggcacttctatcactacccatggcaagaagaaaactatcaatggtaagaaatactacaagattgccaagaatcaatacattagatcagctaacctttactaaaaaggcaaaataagtcatcaaaaaatgcaccaggtagaaattacctgatgcattttattttatccaattttttacttggcgaattgttcaccagctaagttacggtagaagttagccttagcttgacggtaatatgggttaacccacaataaaccgatcccgcaggaaataataccaagtagccaccagccgatgaaacttaaatcaaaaataaacaagtccatcttatggccatccatcaacttacggctggcactgatagcttctgtggcagtcggctcatgaccactatctagcatgtcacgcaagatatatggtgtcactgcatatgaataagccttgatcagccctggaataatcagtaaccaagtccacaaaataagaaaaatttcatataaaatataagttaaaaagttactcttaaagtttctggtaaatggactaaagatacctgaaagaacattttccttagtaccactatctctaaaatgcaagatagtataaattacgccccatgtgattaagccaattgcaactgaaactaccaaagtaatcagccatgcaaaaggattaactcttactttatctaggtacatcaattcagcattgttaccgaagcggcggacaataccgtacacgatatcttcgcccttttcaaaaaagttttcgatatcggtcaaaatataaacgattagccagccaacaaatgacagcaaaactgcccagccccagttaccacgtaactggtctctagcttgttcttttaattcttttcttgtagtagccattttctctcctcctcacttttctaatcatgagtattgtcgcctaaaatcagggcagaatcaattaaaagcacatcaaaaaagcctaattccaccaacatcggaactaggctcacacagtgttgaccgccactctgaccacatatagaagataacattttcgctaccggagaaaatgactactaatagcgacggtacatgatagattttagcattcaactacctaaaagacaagcgaaaagacgtgttgaattagcggaatggataccaaaatttacggataaaaaagacgaggtctaaacctcgtcttcttcattactaaaattcaagcatcatcgtcattgcacgattgatcttctttttaatctttttaaactcaccagaagcagtatgattatcctgcaaaatgatcatgttctggccatctttagttgcccgcataaaggtataatacccttcaccagcaccattagcagctttataatgctttaaattataaagtccaccattataatagctaggagcctgacccttgaacagaacttttctactcttgttagtcaaaatcttaccagcaagaatatactgcatggtcttagctaaatctgcgttagacattacgattgaaccagcacccagctcattgtgagcatccttaacggctttagcatggttcactttgacatattcaccctcacgcatttcatagcctggtacccaatgactagccaataacttagccttgtctgaccacaagaactcactatgggttagcttcagtggcttgatatatgtgtcatggaacaattgctcgtatgactttttctcaagcttggacaagattccacaaaggaaaatatagtttactgaagtatagtgccacttacctaatttgctagcatcaaacacagtatattgtgcatcatgcttgatgttcgcttcatcagagataaactcaggcgtacctaattgttgaccagctttcaaatccagccctgatgtcatatcaattaagttgctaatcttgactgaactagcaccatctacatttgggtagaattttgaaagtttatcgctaagcttcaactttcctttctctacctcatgcatcaccattgcagctgtcattgacttttgaactgaattgatcaaatagctagtgtcaggtttattgtccgtcgcataattaagcaaaactttgccatgatttattactaaaactgagcctttaacgcccacatggtcaatagcctggcgcactattccgcttttaaacggtctttattgcttaaatcaactcgtttaacgttatccttgttttgccacttcttggagtagaagtagttagacatatcatagtcataacgcttattaggttccttcatgaatggacgaacagcttgatcaactgcaacccagcctttccagcctaggtgaatagtatcttgcataaagtacttttcattgcctcgtcttgaaagatctgcaatattttcaaagccttgactggttaactggtgttccatcttagcaacagactcttggtacatcttgctagataaaccagtgtacttcatccacttgccattaattggtgggatgataaatagcacattagtgtgttgcttagcaaactgctccaacatcaattggagatcaccatattctactgaatgtacatagtcaaaatcacgctgactacccttcaagcgtttcaataccttctttggtaaacgtgttctaaagaaggtattatcaatacctaagttgtttgagttagtgtgtatagcagcttgctctgctgcaaccttattcaaagcagctacagaatacttgttaggtaaaaccttagctctcttttgaatcttatttacacgatcacgcaattggaatgagctgaagaaattatcttcgttacgcaacattcgacgacgattttgtaaataaaatttttggaagctagtcaacttcttgccttgagcaatttgcttaaggctattcttgatctcgccctttacatttggcatttccaacagacgtttagctgcataacgatcagttttattattcttggcactaagcaagaaattacatgcttgcaatggtgaataatacaatgcaaaggcattaggatcttgaccccgcttagtaaaccattgtggtgaaatgatcacaacagccttcttgtttctaagctgcttagctgttccttgcatccccaagaactgagccaaagattgactacccggtccacctaataagaatggacggtagtttctatgatacttttccgcaattacactagggtgaagtgggtcgaatcttgacaactcacttgaaccatagaatggcacgtagccatcttcaaaagcttcctgcttcattgtgctgcccttgaagacagttgtgttttgtgaagctgcagcctcgtaaatcgtttgcttagaaaaagttctttcccaaggaataaggaaaacaactaacaaaaggataaaagcgcaaagaactgggccaaagatttgccacagccggcgtttattactcattttctaagctttccacctttgccacaatcttgtttggagtgtcccattcttcacggttaaattctgaaacaggaacatcaatatcaaacttttcttgcaagttcaaaagcatttgtacacttgccattgagtccatcaaaccattgtcaaagatgttttcatccatttggtctgataaatcttcaccagttaagtcatttaaaatatctaatacgccttgttttgtatccataattaatacctctcaaaaaacaactcaatacttattctacttccagccgaaccacagttgacttaggaaccctgagaaaatcaagaaactgaaacatactacattgaaggttaagaaaatggcgaaccatttagtaaacttgttagatggaatttgcttcttatgctttctcttgaatctaagccacatatcgttgatacaaatagctgaagcatggaagataccataaacaatataataccacgttaagccatgccagaaacccatgattaagaacaacaggaagtaagaaacttgtgataatctaattcgattcttaaacattttcttcttcattgcaaagaaagtgaatcgcatgtagatgtaatcacggaaccagaatgataaagtaatgtgccaacggttccaaaaatccttaatgttcttagaaataaatggcttgttaaagttcattggtgtatgaattcccataaagtatgagattgatacagcaaacaatgagtaacctgcaaagtcaaagaacaggtacatactgtggcaatacatgtaagctacaagccaccatgatagcttcaagccgccatttgcattaccaacggctaaagcagcagcactgatctttggtaacaaataagtgccaaagaaccaaccaatcacaaatttgtataaaaagccttggaataagtatctaacagcatactgcatatctgtaatgtatgcatcacgcgtaggtaccttatcataatcttttttaaatctgcggtaacgatcaataggacctgacgaaatagttgggaagaaaagcaagaatcttgcgtaagtaacaggatctactttcttaattgccccatcacgcatttccataataacttgtactgtcttaaaggttacgtatgagattcccaagaaaccaatgacaaagccaattgagttatcaggaaaagcggtcaaatatttaactgcggctaatggaataattgccaaaatcacagccaaactaaagatccaagtcttatttttaccgtggtgacgataatactgataagcaaaggttaaggcaaattcgtaaaccaaccagattaataggttaaccccttgctcccagtgatcaccatcaaaaatcaagaacaagaaaacaattgaaaaaattgcttcatatgtcttgagtcgatgaccgtaatatagcccaatgataattggaattaaagcgatcatcaaatagatgaaatattgcggattagaataaggctgtaagttaatgaaattaaaattcactacttattaacctccttaattaccgccttaatatctaccttaccattttgtgaaataggtaatgcatcttggtagatgtaacgctgtggaatcatgtaaggcattatattcttagctaagtcttcacgaatcatcttagttaaagcagcttcagaatactgacgacgaacgccttcttttaattcgatttcggcaacgatctgcttaacagtgtggtccttattgtacttaggagcagcaacgccataacggacaagcttgttcttagttaagtagaaattgatttcttcaagttcgattctgtaaccattgaacttgatttggaagtcaattcgaccgcgataaaatagcatatcgccatcaaagaaaccagcatccccactccggtagctacgatactcagcaccatcttcatggaaaaaggcagcttcggtcttttcaggattgttcatatatcctttagaaacactaggaccactaatgataatttcaccttcgccaggcttatcacccttagaagtatcaattgtaatcttagtgtcttcttttaccttaccgattggcaaacggtcatactttttaagaacttcatcagtaatttcaacttgagtaacagcaactgttgtttcagttggaccataggtgttgaaaatatgactatctgggaacttcttcttaagcatctcagcttcactgtgtggcaattcttcaccacagaacaagaaatgacttaagtctggatggtgttctgcatcaaaagtcttgtccaagaagcacatctgtgcaaatgacggagttgatacccaaacattgaactgcatctttggcaaagtttggaataatttaccaaagttttgagtaacatcatgaggcaaaactaccaacttaccagcagaaacaagtgctggataaagactcattactgacaaatcaaatgagtaaggtgcttgtgccaagaaacttggatgttctggcaaattaaagtctgacaactcccagttaacgaaactaagcaaattgtcgtgactaatttgtacacccttaggtttaccagttgtacctgaagtaaagataatgtagtagttctcatcaccttcaacgaagttcttctcgtcaacttcaaaattgtcgtcttcaacttcgctagccttaagaaccttaacatcagttaaatcaacttctggtaacggatcaatttccaaaactagtggtgacttagaaacgtcttgaatcatcgttaaacgttctgcgttagaatagctagcaattggaatataagcgtgacctgacttaacacaaccaagaaaactagcaatcatttcaaaagtttgtccgccccaaatcataattggagcatgctctggaatatctaagctagcaattttatgtgcccacgcatttgaacgctttttaaggtcaccatatgtattagtttcaccgagatagtcgtaaacaacacgatctggttcgtttgcggcgatctcatcaattttcttaataacatcttgaatcatgtgatagcacctaccttaaaattcattataaatgaagtgaacagatgttagtccactatattcatataaatagataagagccatcaggattccgaaataaacaattgttttcaaaacaaacataccaatacgtctgcctcgagaatcaaccttcgtctttttattcattttttctcctttaggtaatcttacttttgcctttgccctatattactacaaatagtggcaacaaacgcactaacggcttatattttaacaaatttaaactttttcttaaatcttcagttatttgtttcaaattgcgaatgcgttttctttactgttgtctcttgcaatcccgataagcaaaaaataatggaataaagataactattgccacaaaaatcaaagcaaagatcattaagcgccatacattctgtggtttagtccacattttactctttgccgtcgccaacaaaaatgccgcaaataaagcaataacaattacttcaaccaggcaaaaaattaaatgagtattttgccagagatataagtaggttgttgccggaaataaacaaaaccaccctgaaaagcgtaaaagaaagatttcttttttacgataatctactttcattatagtttcctttcctcattaactgccaaataacgcattaatattcaccgacaaaatccggtccataactacaatttctggtctggcgtagatcttagagcctgattcaaacacacatagtagttgtcccttataagcggtaatttgctctaaatatggcggcatggtaattaccagttctgcattcttttcgtctaaagcatttaaagctgaagttggaaaaacgtagagcttggaatcaccactaccataagattggctcaaaaaaattttattttggtaaattgcaattccttgaatttgcttatccattgaagtttcgccagttggatcggaccattgcagcgttccggtaacagatttaacttcattattagtaattgagccacgatttttaccactacgcgctatagtgtaagccgcaacttttcctcgaccatacatgttaaaaaagccaacaaacaattgaccatcataatatgtaacggtcgatgctttttcaactgcaggaatggcaatttgatatttatacttaattggtatttggctgccctctttataggcccttaattctgccattgaaaatgctgctagcgctgaagatttgcccattgagccagttatccagatatttttggctactggatcataagcaatcccacctaggtgtggccgaccaggtatttgaatcgttttaagatatttgcctgtcttcttatctaagacataaacaaccgaagcatgctcatgttcaccatcataagcagttagcaaaatatacttacctgcaaccgtaatcccctgtggtgtcattgcagttgctgtattgacctttttagttttaaaatcataacttttagtagcaactaatcccggcaaaacaaagtcttttccatcccacgtccgcggtggtacataattggcaactttattaataaaaggatatttttcacgcaatgctttttggtaattggcaaaattatgccaagcaggactagtgcttgtcccatccttagcaattttttcttttggccgttgacggatcatctcctgcttctgccaccattggtaaccgaaatagcctcctgcaccaatccctgcaagcaaaagcagtactagcaggaagcgcaaaattcttttaccaatttttttcaaaaaattactcccttctgtttaggaattgtccctattatgcaattcattataacgaaaaaacaattactttttgtttttaactccttgctataagctttatttactaaaaagataaatttttttgcaaaaaagtgctttcgtcacacttttttcacaaattaaggttatactagtaaatgtagtgaggaagaataatcctctactacaactcaacttttttgtttttcattcatactcctccaagtaaataatgaaaataaaaagaattgacttactccaattagtcaatttcatatctatccctttcggctcacgtgcgttgcgtgagcttttcttataccttaacttattctcaagcaaatctttaccttttcataataaattgaacacttttacttcacatttacccagtattatataaaccgtagcaagatggtagaaacttgctacaatactcccacttttttatttcattcttactcctccaaagtagatgaaactaataaggtccgcaaaaacttgcgggccttttcctttttcagcacttttttctgtataattaaggtagaaatgaggtgccgctatgttttcaccatcaatcaaacatttaatagaagaaaaatctggttcatttttaatccctgctagccgaattgcctttgtccaagcagacaatcctctttatcatgcctttttgattttgactaaggttaaatattcaaaaattccagttttagataaagaaaaacgagtcgttggcctgcttagtttggaaatgattacggacaagatgctgacgactgatgagatctccactgcccctttagataaattaaaggtcgaagatgtaatgcaaactaagtttgataaaataaacttcgttgaaaccaccctagaaacgcaactgcatctgttaatcaataatgctttcttgcccgttgttgatgatcgcggcgtgtttcagggactacttactagacgcgaatggattaaggcatttaactatgtagttcacacttatgacaaacactacgaaacaaaacgaataaaataacctccaagcagcctttaaggctgctttttttaactccaacatttattgagcaaaaatgtgtccagaccaataaagaatgttagaattaagcggtagacagatatgtttgtattttggggagggcaattatgaaaaatttaaaacgtcaatggaagtttattgtcgttttgattgctggtgcagttggattaattagccaatttgcattgcattcaaagagcctattctcaatcgggaatcttcaatttccagttcatgccatcattattgatatcattggtatcttgatggcaatttctttactattggaaattttccacgattggaagacaggccgttacggcgtagacatcctggctgttatcgctgttgtttctaccatattgattggtgatgtatgggctgaatggatgattttggtaatgatgaccggtggtgaaacgctggaagattacgcaactggtcaagccaacaaggaattacgtgccttgcttgataaaacgccacgtatcgccaacaagttagttgacgggaagatcaccgaagttaaggttgatgacctgcaggtcggtgatactgttttgatcaagccaggtcaacaagttcctgtcgatggtcaaatcgttaagggcacttcaagcttcgaccaatcttcattaactggtgaatcagttcctgtgaccaagaaccctggcgacgaattaatgtccggttcagtgaacggtgatgtagcggtagagatgaaggtaactaaggctgctaaggactcagaatatcagtctattgttgcgttagttaagtcttcacaagctcaacctgctaagttcgttaagatggctgaccgttacgccattccgtttaccgttatatctttaattattggtggtgtcgcttgggctgtgtctggggatgcaactcgctttgcggaagttatggttgttgcttctccatgtccactgttgatcgctgctcctgttgctttggtatcagggatgagttcaatgtcagctcaccatattattgttaagtctggtccaaccctagagaagttggctcgcgctaagacctttgcttttgataagactggtactttgactgaaaaccaattgatcgttgaccaagtcgttactgatgacaaatcatttgatcaaaaagaattgcaaagcttagctgccagtgttgaacaacagtcaagtcacgttatcgctagttctctagttaaggctactgacaaggatttaattcatcccgtaactaaccttaaggaaactaccgctcaaggtgttgaaggtgatgttgatggcaaacacgttaaagttggtaagttatcctttgttgcgccaggtcatgaaaaattaaacgtcacttcaactgctgtttacgtttcagttgacggtaagtttgctggttacatcactttgaaagataagatgcgtccagagagtcctaagactattgaacgtcttcgtcgtcaaggtgcagaagatatcatgatgcttaccggtgaccacaagcaagtcgcagaaaaggttgccaaagaagccggcattactgatgtccgctcagaacttttgccatcacaaaagattcaagctattaaagatgtgccaaagcacctacgtcctgtcgttataactggtgatggtgttaacgatgcacctagtctgaccgctgctgatgttggtattgctattggtgctaagggtgctactgctgccagtgaaagtgccgatgctgttatcatggttaacgatatttctaaagttaacgatgcagtcgctatttctaaacacacaatgaaggttgctaatatcgatgttttaactgcaattggtgtcgttattatcattgaattgattgccttcactggtgttatcccagccttctggggcgctattttgcaagaagtagtcgacatgattacgatcagcttaggtttacttgctaagactaagccaagtgataagcaatttggtttggaagaaaaatagattagatgtgaagaagctccagaatcgatttggttctggagccttttttcatacataattatgcgtagcactgcaccagttcaatttgcatctaagttaaaaaactattaagattaaactcaactaaataatttttagtggttgggtttttatcacaataaaaactttcaagattcgcttctttgggtcaggaagcacttgaaagttttttgtttttttacagaaggggaaaatatgcattttttaggacaacttatcttaatcctcttaactacagttttgctggggcaattattcgcccgcttcaatatgcctgcagttattggacaactattatcaggaattttactgggaccagctatcttaaattgggttaagccaaatgatatcatcagtctattctccgagttcggggttattctgctgatgttcttagctgggcttgagagcgatctagatttattaaaaaaatacttcaagctaagctttactgtcgccacagtcggcgttatcctacccgttgttttcatgggcttagccagttacttctttggcatgcgccctcttgaagcactctttatcgggattgtctttgcagcaactagcgtttctatctccgttgtggtgctgcaagaagcacaccaactgcacacccgtgccggcacagccattttaggtgctgccgtagttgacgatatcttagccgtggttgttctgagtctattcactacattcagtcatgaaggtggcaagagcggcttaactaataactttttgcttaatatcttgattgaagtagtttacttcgtagttgtttggctgatttttaaatttgttgcgccatactttatgaaagcttctgaaaaaatcgacgttgactattccgtcgttatcggttcattggttttagccttaaccatggcttgggccgctgattttgttggtctttcagctgttgttggtgcatttttcggtggtttagcaattcgtcaaacaccacaatacaaagaagttcactcctctgtttccgcaatcggctactctgtcttcatccccgtcttcttcgctgatatcggtctttcaatgacttttgccagctttttcaaggatatctggttcattatcgttatgaccgttttagctattttatcaaaattctgggccggaaaatactccagcgaaatctttggcttcaataagaatgaaggcaatatcgtcggtgctggaatggtatcacgtggtgaagttgcactgattgtagcgcaaatcggaattaaccaccatctcttccctgaggatatttattcaagtctgatcctagtaattatcgttacaacagttatttcaccatttattttgaattactttattaaaaagagtcaaaatagtacggaatttatgtagaaaaagtctagcattcgctagattttttaatagtttaattttacaagtggcttatcataaacgcaattgtgtctacatggtaaaatcaatagtgagaggtgagaaatatgttacaaactccaaacaatattagagctgttaccgctcgtgacctgcgcaataattttaagaaaattgctgatgatattaatgactatgatactaccgttatagtagctcgtcccaaagataaaaatgttgtgattatttctcaaaaagaatatgattcatggcaagaaacttcatatcttctaggaactaaagctaaccgcgatgcattagctgaagctaaacaatcatttgaaaaccaagatcaacgaaataaagttttaaccccagaagaattcgaggctttaactaaagatgacgaagcttaaccttaattttaactacaatgcctggaatgaatatcttgaatggaaaaaagaggataagaagacttcccaaaagattgataattttattaaagaatgccaacgccatccttttactggaaaagggaaacctgagccattaaaagcgaatttaagtggtgcatggtctcgacaaagtaatcataaagatcgcatggtttattcagttaccacaacagaattacaaatatggcagttaaaataccattattccaaatgaaaaagctctttcgagcttttttgtttaacccaattttcctaaatcgattacttggtcatacttctgcaactcatttgattcatagtggtgaattacttcaataaaggtaaggtttgagtttaacaagtaattatgaatttgatctgatgtcttcttatcaagggatgcattaatttcatctagtagcaaaatcgatctatcggccaaaattgcccgtgctagttctattctagctagctgtcccccagacaattgatccgcattatcacccaaggaatagtcccagcccttttcagcaataatttgatccaaacctaatttttggcacacctcgctcaccttttcccgggaaatatttgcacctaaagttaaattaaaccacaaggtatcggcaaaaattactggggactggctagcataagcgaataaatctgtaaacgagcctggcttttgctttttgtcgttaagcaatatttccttggcatgaccatgctttccggttaataggaattgtaataacgttgatttacctacaccagatggtccaataactgcaactttttgaccttttacaactgcaaagttaatttgattagctaattccttgccttttctagtaagatccagatcttctatttgcaaatttgcaaaattataattggtctctttcttttcaaccttgcccttggcaatatatttttctgccttagcgacaattttcttagttgttgataatttgtttcgatcttctaaaatagtcaaaattggattaagaaatgaatttgacagttgaacgattgcaaataaggcacctaaagtagtttgacccttaaccaccatgtaaattcccactaagaatggggttaagaacgtaaataaactagcaatcaagttaatccaagaattagtatctagattgagtaagttcattttacgcaaagcatcttctaattgattgatcaaaacttgatttttcttaaccgcattatcgcgcttgttgtataaatttaatgttgtgctaccagccagaaagtttttaatatgactaacatatttatcattagcagttgtccaattttctgctgcagtttgaatcttcttttgaaataaattagaaaccagcatcggcaaacatgaaccgattaaaaataataatgtaactaaccaattaacacataaagcataccctagcgcaaaaacaatcatataggcctgcatcattatttcaatttcagcatcaaaacgattagtttccagcagcttaaaatctgtagtcaaaaagcctaagctagcagtattttcttcgctagtctgacccagcatcccctttaaaatgccagctcgcagcgtcgtattagtctcttgaatagcacttgtttttaaccgattgaaaatcagcgaagcaataaaagtcgcaataaacgccccaataacaataactagaaattgtgctaaatcgccaaaccttctttgcgtaccaacattggtcaatgtctgtaccatatatgcaaaaatgatttgttgtgtactagcaatcaagcctaaaatagttaacataatgaattttgcatgtgaagaatatttgtaaatcattttttgtcctcctgtattttacttgaggctagtatcgcaggataatgacgaaaaatgttagaaatttacagatctgcaaatcgaggtaaaacattatgttcaaatatggttcaatttacaaacaattgcgcaaagatcaagaaatcactcaaactgaagcctgcaagggtatttgttcaatctctaagttatcacgctgggaaaataatcaggtagaagttgagtttagcaccgccattgcattactcaggcgcatcaacattacgcttgacgaattcacgcattacgctgcaatgaaaacagaatttacattgccagacgacattataacggccattaaagacaatgatacaaaggtactcgaaaaatttgttcaggagcagctaaatcattatcacgccaacaaaaatattctcgaactcaaaaacatcattcttgtctgcaatcaattatttctcatgactggtaaaaactatctaacacctgcagacattaatcgaatcggttcatacctgcttcacaacaccgtttggtctaaatacaatatcttgctttttgctaactcaccgtttttgctaaattctaaaatcggctatcaaattgctctgcgaattattcacaattttcaccctacagaaagtttaaacgaaaatactactattttcatgggcggtttatctgatacagttattgccttagttttcaaaaagaagctagattacgctcaaaaaattcttaatgaattaaaaaagataggacttcccttctatctcatgttctttagttcaacattgacccttttacaaaaaattatcgactactgccacactctcaacgcacagcctgtattggcaatgattgatgccatagttcagctaaattgcatggaagttgctaaaaaatggcttgagatttttaaagacgtacaacaaatctggccagaaaaagaaaattaaaaaccgtaaaagtaatttactttcacggcttttgacatggtattcattatgcaagcttacaaatttttagcttttaattaatccttaacaacgtctttggtgttcaaccattgactcttgttgatcttaacgatcttcttgccagcagctttcttaacatccttagcggtgtaagttgaacccattgaaaccttttggctagtcttgtgaccttgtgcgtccaaaacattaactttttggttcttagtgtcctttacagcaacaaagatcttgtcaccctttttaattgcaggatcagttggcatagtttcggcaacacctaactttggagcagtaaaactagctgcttgactaactgaagcaccaacacccattaaactcattgaagcaactgcgattgaaacaactttaactaaattctttgaaactaacataatgaatacctctaatttctatatcacttaatttgttggaactttttgttccctcattccttacgtctttattgtataacatatgttattaattacaaggggtttatcgaattttttaaaaataattcagtcgtctcaaagtattgctataataacgattgcggggattttttgtccaaaagcattaaaaaagtgtctgagaaaccgttctttcccaaacacttttttaagcagctgctacttcgtttgaattttgagtcacttttctagtttttaaactgacaaaaatcgctacaattagtgttattacctggattactaataatgtaaccaaagcaacagtaacattgaatgaaccagaaattgtggttaatactgttgtcataattggagcaacagccattaagattgtatttaataagccaacagttgaagccaagattttatgatcaactgatgttactagccattgctccattttaactgaagcaactcctgcaatagctgccaagaaaaacattgttatcataattacgtaagtatttcctaggaaaatgcttgttgtagtaacaatacttaaactggcagaaataattactaaactaaaaactgttaattttttgaataattgtggtccaaacattgaacccaatgcaaagcctgcgccaataaccacaccaaacaaagcaatagtaaagctataagtgccgattagcatagttgaacgatgagctgcaagtacaattgttgtcaatggagtaattgtatctaaagctccatttaataatgcgattactaataccacagtcaataatcctgattgtttcttcacttgggtcaatgaagttttcattgtttggaaaaagttttgatcattaacttcctttttttcaagtggcttctgatccttctgatgttttaagccaacactggcaaataacaaacctgctaacaagaaagtacctgcattaacaaaggctaaagttgagtatgacattactagcaaaagtgctgaaccaatgaattgagcacccatactaataatttgatttacgccgccattaaagcctactgcattcccgtattcttttttaccaacaatatcaacaattaatggtgcaaccaagccacctgaatatgaaccaatagtatctgataagaaattcacaacaacgatgattaaaaccaaattccactgtgacattttagtgataaacaataatcctactaaaccatataagataaatcggacaaatgctgctaaaaagatattgcgaaactttttcttagtcttatcagcaaggtaaccaccaaagatctcgaataattttggaactgattcagaaattgcaattaatgaaagtgctaatgagtagttttgtaatttgctagcataagtcatgaaagccaagtagaaaagaatatcgcctgcgcctgaaagaaaactagctactgaaaatcttctaaagtctgcgtttttaagaaatacgttcataaatcttaccccctttttctttgtttcgtttgttgttgaaattataataaagtgaaaaagaaattaattttaaaaatggcgtattcgacattcggaggataaacctatgacaattggtgaattactcaaagaaaaaagactagcagaaaacaaaactcaaaaagcatgggttggtcatattatcagtacttcttattatgctaaagttgaaaagaatattcatagaattacagcagaggatttattagccattcttaaacataatgatctttcaattactgactttttcgaagaattagcagacaaaaaggatgaactaaaagcacaagtaaactcgctaaataaaacagtaattgatgctgtttatcattctgatgtttccaaagttaatgaagtcattcaaattattaaaaaaatggatctaccgactaagcaaaaacaagaacttatcttaatcaataaggggtttatcgaaactatcaaaaatgatctaagtgacaattatcagccagataaaaacatcgttcaacaactaaaagacaaaatttttagtattcctaattttaatagattcaaacttgaactctatactaatttcatgcaattttatgattatacaactaatattatgatcaccaaacaagtgatccataaaatagatcagtttaagagcgataaagagttattagcaatcgctggtattctattcaatctcctttcacaattagtcgaagaacatcattatcaagaaactgcaccatttatagcagctagtgagcatttaccctttttaccagacttatactttcctcaaaccggaatctcattgctaaaataccttattagttatcattttaataaaaaaacagcagacttagctaaagctgagatgattgcacaaacttatcaaattactggtctagaagactttggtaaaggtgcacaagaaattattaatgaagttaaagaggactagctttaagctaatcctcttgtttcaatctctaaataaaacctaacgcgttatagcacatgtgcaccaaaattgaatagcgcaaatctttggttgacatatagacccaagctaaaaccatgcctaagacccaatatactaagatatacttacttaatgccggatcatgcatatagccaaataaaaatccgcttgcaacaatacctagccacttatttctagtatttttcttagtgaaaaagatattgaaaaacatccctctaaagatatgttcctcacaaaatggcgcgatgaaaactactaggatcctaaataaacctgcattgtattccgctattttattcaagctttcctggttctttgaaacgccgccaccaactagattaagcatcacaatcgaacctactacaatcagtacaaaaccgatcatcgctattccgattctgcgccagtcccagtgtggtgtttcatcaaagccccaatcattttcttcttttaattgcctgcgataaatataggaaattgcaaacaaaactattaccgtagcaagcgccgtaacgaagacgcgatattgcgccaaatcaaatcgctgaggtctaaagtaaagtacttctaattcagaataaattaccaaagccaacacagcccctgcaatatttcccaggtaatgtccaaatctcttcatttttcattcacaccttgattctttcaactagtaatcattgtttctattataatgtaaataagaaaaaatacctaaggaggagtatctatctatgcttaatcagatcatcgcttttttggggagacgcggtgagttcttctacatttcagtctttatgttactgatattttttgcctttttaatctcttggcttatcgaaccaagacgtttgattaatggcgttttgtttactatctttatagtctcaatgctctcttggatcaccgttatggtgcacaaaagtacgagtcacggcttgcaacgtgcctatgacctactagttctagctgcattatttggcattgtcttattattaattttcgcctggatttttctattctggaatgcctatttcgtttggaaatatgaaagccatactttgcctaacttgcttactttaattaccggatttttagcattaattattagtattatcgtgctcttaggaccaggtaagtacttgccacgttggcttagtctcgcattagcttcaattcccgcgattgcaatttatttgggattggtgctttacaactttttggtaaacttgcttctatatcaaatttatcctcgtacctaccaccaagactatttaatcgttctagggtctgggctaatcaatggcgaccaagtatcaaaactgcttgcggctagaattaatcgggcaattcaatactctaaccgccagtatcaaaagggccgcaagcgccctatcctgatcatgtcaggtggtcaaggcgctgacgaaaaaatctctgaagcactcgctatgtctcgttttgcacaacggcgtggcgttagtgttgaccgtatcttattagaagatcaatcgaaaaacacatacgaaaacatgctcttttctaagcgtattgccacaaaagattttggtaattcccacttcagggcacgcttctttagcaataattaccatatttttagagctgctctcttggctaaggaagttggtttaaaagccaatggtgtcggtgcttacaccagattctactacttgcctaacgcaattatccgcgaatttgccggtgtgtttgtcatgcataaacgccgtcatttcgttatcatgggattaatcgttttattctttatcctgcaagctatcttagtcatgacaggattagaaagatttactgtaatttagaaaagagggatgcaatgcttcaactaaagcatatttttaagtcatataaggtgggggacaacatcacccacgctttagacgacgttacaatctcgttccgtgaccaggaattcgtcgctatcttaggtcctagtggttctggaaaaactaccatgttaaacgtaattggcggacttgaccgttacgaccaaggtgacttgatcatcaacggcaaatctaccaagaattttaaagagaccgactgggatgcttaccgcaacaataccgttggttttgtttttcaaaattataatctaatcccccacttgtcgatcatcgccaatgtggaactagggatgaatttgtctggtgtgcctaaaaaacagcgccatgaaaaagcaattgcggcgttaacagaagtgggattgaaagaccatctaaataaacgtcctaaccagttgtctggcggtcagatgcaacgagtagcgattgctcgagcaattgccaacgaccctgatattctactttgtgatgaaccaactggtgcacttgatactgagacttctgtccaaattatgaagttgatcaaaaaactatctaaagatcgactcgttattatggtgacccacaatcctgaattagctaaagaatacgccacaagaatcgttaatttccaagacggtaagattcgtcatgattctgatccttttagccctaataaggaagaagacaaatttaacctcaagcgtaccaagatgtcttactggaacgccatcaagttgagtttcaccaatattatgacaaaaaaaggtcgaactctgctaactgcttttgcttcaagcatcgggattatctcaattgccgtagttttagctatctctaatggttttcaaaagcaaatcaataccacaatgagcaaagctttagcaaaatatccgatttctatttcacagaccgcaactgacattacttcagctaatgcacgtaaagaatcggataaaaatgtcaaaaaccgcggctatgtaacggcagaacaagaccaaagcgaacaggcccaacacgttaataaaattagcacaaagtatgttaactacatcaagaagatcaatcctaattatgccaataacgtgtcttaccaacgcggcgtaagcttgaatttattagctaaaaacaagggaaaaattgaacgcgtgcaattttcaaatacggatcctgatcagactaattctgttctagctgctagatcccaagcgatgagttcaatgggactgggttcaagtgtctttcccactactttaaataaagagaaagactcatttttgaagcaaaactatcaattgctctcaggcacttggcctactaaggcaaccgacttggttttagttactgacaataaaaatactgttaacatcaatgccttaaaaaatcttggtttcgatttaaagaataaggaacacgtcaaattcggccaattagtaaataagcaatttcgtgtagttgctaacaatgattactatcagcaattgccaactggcatgtttattcctaaaaaggtaaataacgccatgtataacggtgctcaaaccaagctaaagattgctggtgtcattcgtcctaaaaacgaagattcaatggccttgttatcaactggaattgcttatagcgatcaactttcacaacgcgtgattaatgaaaataaaaactctgcaattgtaaaggcacaaaagaagagtaaccatagcgtattaactaaccaaaaactaaatgccaatgaaaagaaagctacaatgcagactcttggcggtaccagcatccctactggtatcatgatttatcccaacaattttgatgataaagataaagtacttgattatcttgacaaatggaacaaggggaagaaaaaatcagacaagattctctatactgacatgtcaaacgctgttaccacaatgactggcggcctcttaagcgggataacgaccatccttgtcgcatttgctggtatttcattaatcacatctatgattatgattggtattttaacttatacctcagtacttgagcgaactaaagaaatcggggtactcaaggcattaggtgcccgtaaaaaagacattactcgtgtctttgatgccgaaaccttcatcctaggtgttttctctggtgtattaggcattctgattgcttacctactaacattcccaattaacagtatcatttacaagattactgatctggcaaatgtagcccaactagatcctactgctgctattgttttgatcattatttcaactatcctcaccctcttaggtggtcatattccagcacgaatggctgcaaagaaagatgctgcaattgcattgcggagtgaatgaatttaataaagaatttgttacgttgttcacaataacctaaatttttagcaaaatatgtggtatcttagctttagcaaaaacaagtaagaaaggaacttttttcaccatgactgttaaaaaattagaaaataacagcgatgttaatgtagtggcagaagaaagcaaagttttaactgatttattgaatgaatcaactaagcaagtaatcggtcaagcagctttcgataagatccaaaacttaattaaaatctctgccgccaaagattatcaagaacttgaaaagcaaattgctagtcttaacaatcgcgaaatgattgttgttgcacgttattttgctactctcccactcttgatcaacatttcagaggatgtagaactagcaagtaaagttaatgtgcttaacaatactcatcaagattatctaggtaaattgagtgacacaattgacattgtagcccaaaagaaaaatgccgaagaaatccttgaacatgtaaatgtagtacccgttttaactgcccatcctactcaggtacaaagaaaaaccattttggaattaaccgatcaaattcatcaacttttgcgcaattatcgtgatgtgaagaatggcacaattgatcgcgatgaatggactgaacaaatgcgggcttgcattgaaattttgatgcaaactgacattattcgtggtcacaaattaaaggtagctaatgaaattaccaatgttttggcttactaccctaaggctttaatccctgcaatcaccaaatttactagtcgttacaaggaattagctaaaaaacacgggctaaacgctagtcatgctacgccaattaccatgggaatgtggatcggcggcgaccgtgacggtaacccttatgtaacggctgatacgctagaactaagcgctactttgcaaagccaagtaatctttgaatattacattaagcaaatcaataagctttatagagccatttccatgtctacttcttatatggagccatctgacgatgtaatgcacctatctgagctttctaatgatgattcaccattcagaactaacgagccatatagacgggcattctactatattcaaagccgtttagtgcacactgaacaaaaattactgaatattactaacaagaacactttcttaaagaaacgtgacctccaaaatcttgataaaatcccttgttatcaaaatgctcaagaatttaaagccgacttagaaatcatcaaaaattcacttgaagaagaccatgatcacgccgtagtagacagctactttactcaaattcttgaggctatcaacatcttcggcttccatctagctacaattgatatgcgtcaagattctagcgttaacgaggcctgtgtcgctgagctacttaagagtgctggaatttgtgacaattatagcgatttaagcgaagacaaaaagatcaagcttttactcaacgaattgaacaatgatccacgtaacttacacgccaataacaaacccaagtctgagttactacaaaaagaattaaagatctacaagactgctcgtcaattgaaagaccgtttgggtgaagacgtcatcaagcaacatattatttctcacactgagagtgtttcagacatgctagaacaagcaatcatgttaaaggaatacgatttacttgataatcaaaaagcccgaattcaagtggtaccactatttgaaacggttgaagacttgaataatgcccgggaaataattaaggaattcttaagctttgatatcgtcaagaagtggcttgtttctcaaaataattatcaagaagttatgttaggctactcagattccaataaggacggtggctacttagcttcatgctggaacctttataaagctcaaaaggatctaactaagattggtgaagaaatgggtatcaagattacctttatgcatggccgtggcggtaccgttggtcgtggtggtagtccatcatacgaagcaattacagcacagccattcaagtcaattaacgatcggatgcggatgaccgagcaaggtgaaattatccaaaacaagtatggtaataaagacaccgcctactacaacctagaaatgttagcttcagcaacaatcgatcgaatggcttctaagcaaattgttagcgaagatcatgtcgcagatttccgttcttcaatggatcaaatcgtagctaaaagcaacgaagtttaccggaaactagtatttgagaatcctaacttccttaagtacttcttccaagcaactccaatcaaagaaatctctggtcttaacgtaggttcacgtccagcttcaagaaagaaactcactgacttttctggcttaagagccatcccttgggttttctcttggtcacaaagccgtgtaatgttccctggttggtatggcgtaggttctggtttcaagtcatttatcgatgctgatccagccaacttgaaggaattacaaaatatgtaccaaggttggccattcttccactccctgctttccaatgttgatatggttttatctaaatcaaatatgagaattgccaagcagtatgcggatctttgcgaagatgaacaagttaaatcagtctttgatatcatcaatcaagaatgggaactaactaagaaagtcatcctacaaattgaaggtcatgatgaattaatcgaagatgcacctactcttaagaagagtctggaatacagaatgccttacttcaacattttgaactacatccaattagaaatgatcaagcgtgatcgtgaagatgtgattcaaggtgtttaccaaagtattattccaattactatcaacggtgtggcttccggtttacgtaattcaggataaaaaacacataaaattcagctaaaaaaggctcctcattgcctgttttatcaagcatttgaggagctttttttttaatttattaaactttttagttacgcctttttcataactaagttaagtggcgttacaattactggaacgacaatggctgtaaaaattgcttctactaaaccgttcatgcccagtgccataattaaaattaaaatcaatggcgtacctgaactataatttcctaggtaatgagttaagcttgctggatcatgcatgaagaaaatactcgtcagcaaaataaccatcacggtattagttaacgaagtgactgctccacttatgatataacccaatttcgcatatttagtcttactcatacccttcgcaataattcccgggaaatagccagccaaaatacttggtaccaatgaaattaccggattttggaacaacattaagctgaccatatcgccaggttgagtatatgcaacaatcaatctggtaataccccagaataagccaaagcctagacccgccttttgtcccattaacgtgccatagacggcaattgtcattggaatagtagttacagctggcaaagccgggataattcttacatagccaacatttggcacaaaagtctgtacaatcaataaagcagcaaagacagcagtaattgctaatcttttagtttcttctcttctcatatatttctccaacttaattctttagactcaattaaaccataattaagattttttctcagcaaaaaagtttattatacaatatctaggtatattttatctaatatgacaagatattgtattttttattatttttttacttaattatgcattatccttactctctctaatgcataatcgtgttctataccaattaagaatccctttatatcaatactttatgttgtatgtcaattttgacatagccactaaatattgttaatcttgttttgtgttaaaaatcatttgatggagagaggatcaattttatgaataaaaaagtcaaaaaattactatctattggtgtgcttgcattgagtttaggtgcaattttaaccgcctgctctggtaaaaaacagggtgcaagcaataataaatcaagcgatgccaagcactctattgcattaattactggcggtaatggtgtaaatgataactcttttaaccaatctgcttgggaaggatttcaaagttatggcaaagagcacaacttgagccgcggtcgaaacggttatcaatattttcaatcaagtagtgctgctgatttcactcctaattttgatcaggcagctaaagctggttatcaaactatctttggcgttggttacagtttaaaagatgccgtagcttctgccgccaaacgctatcctaaaaagaattttgccattattgacgatgtaatcaagggacaaaagaatgttgtctcagctaatttcaagagcgaacaagcttcctacttggctggtgtcgtagctgctaaagaaaccaaaaccaacacggttggcttcatcggcggtgctcatggcgatattgtcgacctttttgatgccggatttactcaaggtgttaaagatcaagccaaaaaaatgcacaaaaaagttactatcttaaaccaatatattggcaactttactagttcagacaaggccaaatcaattgctcaatcaatgtacaccaaaaaagccgacatcatcttccatgctgctggtggtgctggtgatggtcttttccaagaagctaaagccattaatcaaactagaccagctaaagataaagtgtgggtaatcggagttgatgtcgatcaatctcatctcggtaactacactgctaaaggtgggcaaaaatctaattttgttttgacatcagtaataactggagtaaatgttgctgtcaaagatatcgccaatagagcttataataataaattccctggtggcaagaatttggtttatggacttaaaaacaatggtgtttctattgaacgaggacagatttcagcttcaacttggaaagatgcccaaattgctagagctaatatcctaaaaggcaaaattaaggttgccattcatcctaacaataaataaaagcatactagtatagtttgctttttataattacaatcaattattttttgcctgatcaatatttttgttgacaaaataccaaacaattaataaacttatttataaattgttcggtattaatattgtggaggacagaaataatgaacgtaaagttcaagaaaattttatcatttggtgtcgttttagcatcagttggcttgattctaactgcttgttcgggtaaaaagtctggtcaatcagccaacaaagatactaaacatggcattgccctaatcacagatgaaaatggtgttgatgatcattcatttaaccaagctgcatggtcaggatttaaagcatacggcaaggaacatggtttaaaacaaggaaaaggtggttatcaatacttccagtctagcagtgccgcagacttcactcctaactttgatcaagccgctacagccggctaccaaaccattttcggtgttggctatcaattagccgacgcagtcaagcaagcagccaagaagaatcctaaaaagaatttcgttatcattgatagcgttgactctgggattaagaacgtcgcttctgcaacctttgaaagcaatcaagcttcttatcttggcggattggccgcagcttacaccactaaaaccaacaaagtaggtttcattggcggtgctaagtcatctattattgatttattcgaagccggttttaagcaaggtgttgctgacggtgctaaagctcttcacaagaagatttcagttcaaacccaatacatcggtaacttcacttcaaccgataaggctaaatcaatcgctcaatcaatgtatgctaaccgcgctgatattatttaccaagcagccggtaacgcaggtaacggtgttttccaagaaggaaaagattacaaccaagcccgtccagcagctaaaaaggtttgggtaatcggagttgacgttgaccaatctaacctaggtaactacaagtcaaaagatggtaagaaagagaacttcactttaacttccgtcttaaagggcttagatgttgctactaagtcaattgctaatgatgcttacaatggtaaattccctggtggtaagcacttagtttacagcttaaagggtaatggggtttaaatcaccaaaggtaatttaaacgctaaaacttgggcagcagtacaaaaggctcgtcaacaaattattgatggcaagatcaaggttgctactgctccaactaagtaattcagctgcttagtattttgagaactcttcgttttttagcgaagagtttttctatagttaattaaggaagtatttatttacatgaaagaacagagaaataaagtaatcgagatgcgtcatattgtcaaagatttcgatggtttcaaggcaaatgacgatattaaccttacgctctatcaaggtgaaattttggctttgcttggtgaaaatggcgcgggtaaatctaccttaatgagaattttatccggcttgcttgaaccaacaagcggtgaaattctggttaataatcaaaaagtaaatattaaagatccaaccgtcgctaaaaagttaggcattgggatggtacaccagcacttcatgcttatggactcatttaccgttttagaaaatattattctaggacatgaatcaactaaaggaccagttatcgatctgaaaaaggcaagaaaacaggtcctagctcttgcacaaaaatatggctttgctattaatccagatgccaaaatctctagcattactgtcgcccaacagcaaagagttgaaattctaaaggtactttatcgtggtgcagatattttaatttttgatgaaccaactgctgttttaaccccacaagaaatttctgaatttattaaagtactcaaaaatttagctaaagaaggcaaatcaatcattttgatcactcataaattagaagaaatcaaggctgttgcagatcgagttacagttatcagacgtggtcacgatgttggtacttttgctgttgatcaagttagtgatgagcggttagccgaattaatggtggggcggcatgtcaacatgaagctaaccaaaccagcacctaacttgggcaagcaaattctagcaatcaaaaacttacaggtaaaaggaaatcacggtgccttaagcgttaaagacctttccctttcaatccgtggaggcgaaattttagggctagccggaattgacggcaatggacaagatgaactggttgaagcaatcactggtttacgccatgttaagtcggggcaaatcttaattgatagtcaaaatttaaccaaccaaaaagttcgcaaaatcaccgaagctggcgtagcgtatattcctgcagaccggcaaaaatatggtttaattcttcacatgtcattagctgacaacttagcgctgcaaacttactaccaacgtcccttctctaatcatggcatcattaatcatcaagcaattttgaagcatgccgtagatttaattaaaaaattcgatattcgaactactagccctgcattgccagctagcgacttatcgggaggtaaccagcaaaaagcaattatcgctagagaattaaatagaaacagcgatctaatcattgcattccagcccactcgcggtttagatgttggtgcaattgagtatattcataagcagcttttagctcaaagagcagcaggaaaagctatcctattaatttcatatgaacttgatgaaattatgcaattatctgaccggattgctgttttgcatgatggtcaaatttcaggcgaagtattacctgaaaaaactacagatcaagaactaggtcttttaatgaccggtgttaagaaagaagatgcaacaattgattaaagttacacctaaagtcaaaaatattctagtaccagttatctcagtaattgctggttttatagttggtgcaattatcatgctgatttggagttataatccttttcaagcatacagctccatgttctctagcgcactgggcaatatgaatggtattggtgaaactattcgtgaagctacgccattaatttttattgctatcggttttgcaattgcctcaaaagctggcttttttaacatcggtttgccaggtcaagcacaagctggttggttgacttctatttggattgtattggccaatcctcaattgcctaagccagtattattgcctttagctattattgcaggcgctatagctggtgctattgtggcaggaattgctggctatttaagagctcaatttggaactaatgaagtaattactactatcatgcttaactatattgtgctctatacttgtcaatatttaatgcaacaagtaatgtcctcaaaattaagaattgataccgatactaccaaaacaattccagccaatggcagcttaaagcttaactggttaactagcatgtttggtgattcgcgaatcaatgctggtattttcttagcaataattggacttattttttattggtatttaatgaaaaaaactaccgttggttttgaaatcaaggcagttggactcaatccttttgctagtcgctatgccgggatgtcttctaaaaagaatattattatttcaatgttactttcaggtgcattttctggcttaggcggtgtagtacaaggacttggtacctaccaaaactacttcactcaaacaactagtttggatattggctgggacgggctttcagttgccttacttggtggtggaactgcaattggtattttattagcttcacttcttttctcaattttaaaaattggtggtttgggcatgcaaactattgccggtattccttatgaaatcgtatctatcgtaattgctgccatcattttcttcatcgctatcaattatgtcattggtttgctttttaaaactaagaagaaccgcagtgattactacattccaaccagaaaagaaaaaggacccaacaatggtgttgatggtccaggtagaaaagtaatcgaaggagaaaaataatgaatttcgttacaatgatggcgttaattgtttcatccactttagtttattctgcgcctctaatcctagcttctcttggtggtgtttacagtgaaaactctgggattgttaatattggcctggagggtatcatgaccatgggagcctttgcggcgattgtcttcaacctaactttcgcttcaacttttggtgcagctgctccttggcttggcactctagtcggcggaattgttggtttgattttttcattgcttcacgctgttgccacaatcaattttcacgctgatcatgtcatttccggaacagtgctgaacatcatggcaccacctttgggtgttttcttgatcaaggcaatttatgataaaggccaaactgaaaatatcaccgctaactttggctacttcagctttcctggtttaagcagcattcccatcgttgggccaatcttcttcaaaaacacctctgcccctgcttggattgccattattcttgctattttgatgtggtggattttatataagactcgctttggcctacgcttacgttcatgtggtgaaaatcctcaagcagctgacacaatgggaatcaatgtctatggcatgcgttatgcaggtgtattaatttccggctttatggcaggtcttggcggtgccgtctttgctcaagcaatatctggtaacttctctgtttctactatcgttggacaaggattcatggctttagctgccgttatatttggtaaatggaatccaatcggtgcaatgctctcatcccttttctttggttttgctcaaagcttaagtattattgggcatcaactgccaggaatcgatcaaattccatccgtttacatgcagattgcaccttacgttattacaatcatcgttttggtcctcttcctcggcaagtcagttgcacctgccgcagatggggttaactacatcaaatcgaaataaggaaaaaaggttgtttcacatgaaacagccttttattttacacatgtccacatagttatccacaagatatagcacttatatgtggtagtcttactatatcttgtactaaataacagctatcggcgttttctcagttggcattggaaaatcactgttaagcaatctaagctcatcatctgtaagtttaatcttttgtgttgcaatattttccttcatgtgttctacactacttgccttaggaatcgttaaaacattgccattgcgcatcgtccaagctagcattatctgatgaggcgtaacgccatgatcacgtgcaacaattttcaaattacgcgtaattcgaattgtgttgcccttgcctgaattaaatggtgaatacccaataaagtttacaccgtgctcttcttgccaagcttgcagatcaaattctgtcccacgttcactgatattgtataagtcttcattagcaaagcattcttctccacctggcactgtaaaaagctcctgcatatcagccgtatcaaagttagatacaccccaataacggatcaagccatctttttgtaatgcttgtaagccgtggatcgtatcagacaagcgatgactgccccgccagtgtaatagataaagatccagatgatctgttccaagacgttttagactggcttctagactctgacgttctagttttggcgttgcatgataggggtagaattttgaaatcaaaaataatttttcgcgatcatatcctttaatcgcttcaccaattagctcttcgctttggccatccccatacatttcggctgtatcaattacactcaggccatgatcaaggccatagcgaatagctgctatttcatcttttttctttttaggatcttcacccaaaccccagctaccaattcctaaacctgttagtttttcaaaattcatcctcgttcacttccttatgttcaaattttaacataattgattcgtaattatttttatcaatcaattgacaaaatggtctattccattttataatggactagaccaacaaatgaggaggacttaattatgaaagttattgttaccgaaaataaaattcaaggtggagcaaaagcatttgaaatttttgaaaaaggaatcaagaacggtgctaaagtcttaggtttggcaaccggctcaacccctgaaacactttaccaaaactgggtaaaaagcgatcttaactgtgaaaatcttaccagcattaacctcgatgaatacgttggtttaaccccagataatcctcaaagctaccactacttcatgcaaaagcatttatttgacaagaagccatttaagaagacttacgttcctgacggtatggcaaaagacgttgatgctttttgtaaagaatatgatcaaattatcaaagacaatcctatcgacattcaactattaggaatcggccgcaatggtcacattgcctttaacgaaccaggcactccattcaacatcggcactcatgaagttaagttaaccgaaaatactatcaaggctaatgctcgcttctttgacagtatcgatgaagtgccaaagagtgctatctgcatgggtactgctaatattatgcaatctaagaagattgttttgatggcttttggtgaaaagaaagctcacgcaatcaagaaaatgattgaaggcaaagtcactgaagaagtacctgcatcaattttgcaaaaacacccagatgtaacggtgatcgtagacgaggctgccgcacaagaattagacgacaaatacaagaactaaaaacaataatttaattatcagcatagaaaaagctaggctttctacaatcgtggaagacctagtttttttatttagcagcctgtatctacaatgaaatatacttcacaaaattgcatttttatataaaaaatgaagcataattcagttttttattgaattatgtttcattcctattcgattttttatttctacccttgacttttagatgtgaaacataatcaaaaaatcacttgtgtgccacaacatatcgtattaaacttaataattgtctacatatggtatttaagaaagaatgtgattcaagttattgttttaagtgggccaattggagccggtaaatccagtttaaccagtattctagctgaacatttagggactcaggcattctatgagggcgttgataacaatcccgtattgcctttatactacaaggacatgaagcgttacacttttttgcttaacacttacctccttaaccaccgtttagcacagatcaatcaagcaattcaagaaaaaaacagtgtctccgatcgttctatctatgaagatgcactgttcttcaagatgaacgccgatagcaaggtcgctgatccaaccgagttcaagatctacgatgacttactcgacaacatgatggaagacactcctggcaatccaagtaagaagcctgacttactgatttacattcatgtctcccttgatactatgcttaaccgaatcaagaagcgcggtcgttcatttgagcaaatcagcactgatccaggtttgaaagattattacgcaagacttttaaagtactacgaaccatggtatgaaaattatcatgcctcaccaaagatagaaatcaatggcgacaaacttgattttgttaccaacatggatgcacaaaaagaagtacttaaagaaattgatgaaaagttgcatgaaatcggcaacttataagaaaaagaaggaacgtgatgacagttattgttttaagcgggccaattggagccggtaaatccagtttaacaggtattttatctaaatatttagggactaagcctttctatgaaagtgttgatgacaatccagttttgccacttttttacgctgaccctaaaaaatatgcattcttattgcaagtatatttcttgaacacacgcttccacagcattaaagacgcgctcactgaagataataacgtcttagatcgttctatctatgaagacgccttattcttccaaatgaacgctgatatcggccgtgctacttctgaagaagtcgatacttactatgagttattgcacaatatgatgggcgagttagaacggatgccaaagaagaatcctgatttgcttgttcatattaatgtttcatatgatacgatgatcaaacgaattcaaaaacgtggtcgtccctatgaacagttaagttatgattcaactttagaggactattacaagcgtctgcttcgttattacaagccttggtatgagaactacgattactcacctaaaatggaaattgacggtgataaattagacttcatggctaatccagatgataaagaaaaagttttggatcaaattacagccaaactaaaagagatgggcaaattacctgaagattgggaaaagcctaccgatattcaaattgaagcataataaaaaccattcatttgcgaaattatcgtatttgaatgattttttgtttacagtgaatttttcgctttattgttgtataatttgaaaaaatgtgtttaaaggaggagtttgaaaatgatgttaaccgtaactggtggacaatggtttttcccacttgtcataatttgtctaattttgggtattgtcgcaaccatcgctcaaaagaaaaagctgactaaactaaaaagaataaccgataactttgcctatgcaatattagttattctcttaatcattgaatggattctatattttcaaaaacaatttaattttattactccagcaatctacacccttgttgtcatctatcttattggacggcaattactaatcagataccgttcttctctattgaaaaaattaggggctaaatataagcaactgacaattggacttgctactatttacattattttagttaccttattgcttttaatcggatctaaattttcaactatgggctggatcattgctggattagttatcgtagcctttggcttcgttagctacatctttgaaaaagacaaacaataatttcccaggaaataataactcgcatagagcttctatgcgatttttatttattcaatttttgctaatgccttcgcaaccccatcatgattgttatcagcagtaatttgttccggagcaaatttttgttttagttctgctggggcattacccattaaaaatggataccccacttcttccaacatatcttcatcgttatagttatcgccaaaagcaatgcaattttgcaagtctacgccatattcttgagcaactattttgactgcactagccttgcttacaccctttaaaacaaattctaataaattctctgctgatctaacaaaagtcaaatcaggatatttagcagttaattcttcttgcatacgatcaagatccgctgaatctcccataattagacctttatgcacgccctgcagtttttcaagttgattaattgtagtcggtgttgcttttacatcgacaattctttcttcatttttaacccgtgggctcttttcttcactacaataccaaacatagccactatagatattccaagctgcatcattatcttgctcatcaacgtagcggcaaatttcagctgcttcttttgcattaaaaaaacggctgattagtactttgcctgtttcatcaagggctaaagcaccgttatacgcgataaacggacaaactttcaaaatttgattaaccactgtcatcatccctttaggaagacgtgctgatgcaggaacgaaaatattaccattaataatttgtctacgaattgcatcccgcgttgcggcggttacctttaaatcatcattaattaatgtgccatcaagatctgaaaaaataagttgtgcggacattctttcacctttatttcttttttaattcttatatcctaggataatgctttatttatgctaatgaaagctgattcaattaaatgcttttcctatcatttaaagataaattgcaataaatgcccaagtaatcattaaaataattcgcgtttacaaatttatttatcaatgctaaagtataagagttgtgttcaataagttaaaacacgaacaatattttggggagataaaatgaattttataaaaagctactttcaattagataagtacaaaaccaacattcgaactgaatttattgctggtttaactacctttatcagcatgtcctatattttgtttgttaaccctagcgtactgggcgccagcggtatgaataccggtgcagtcttcaccgctactgctttagctgccgctcttggtactgcaatcatggggatcgttgccaactacccgatcggtgaggcaccagctttgggaatcaatgccttctttgcttacaccgtatgtattgggatgcatgtttcatgggaaacagccttggcttcagttttcgttgcatcaattattttcatcttaattactttattcaaattaagagaaaagatcattgattcaattccagctgacttgaagttcgctatttcatcaggtatcggtttattcattgccttcttaggtttgcaaaacggcaagttaatcgttgcaaataaatcaactttggttggtttaggttcacttcacgatccacttgtttggattaccatttttggtttgcttgtaactgttatcttgatgatcttaaacgttcctggtgcaatctttatcggtatggttttggcagctatcttcggtatttgtaccggtcaaattgcattgccacacaaggttatctcaactgctccaagtttggctccaacttttggtcaagctatcttccacgttaaagacattaacactgttcaaatgtgggttgttgttttaaccttcctgcttgttactttcttcgatactgcaggtaccttaatcggacttgctcaacaagctggtttcatgaagaacaacaagatgccacgtgtaggtaaggccttagcagctgactcaagtgcgatggctgttggttcaatccttggtacttcacctgttggtgccttcgttgaatcaagtgctggtatcgccgttggtggccgtaccggtttaaccgcagtttttgtagcgatctttttcttaatctcaatgattttcagtccattgcttggtgttttcactagccaagttactgctcctgccttaatcattgttggagtattaatggcacaaaatactgctcatattcattggaacaagttggaaattgcagttcctgcattcttgattattttagggatgcctcttacttactcaatttcagacggtttatcatggggcatgatcacctaccctatctgtatgcttgctgctaagcgtggcaaggaagtcacaccgatgatgtgggtactgtttgtagtattcctgatcttcctgtgggtactgaacttttagatgaaaaagaatagataaagaaaaggactaagttcgaatttgaacttggtcctttttgtgtattcactaacattactttttattcttatcgattataatcgataaaaacgtcaaaatcaccaatcttatcgagtataatcgataagattgcaaaaaaagagtcttttatcgactatactcgataaaggctcttttttatattacccaggaaatattaacgtacagtttctaaacaatatgattttttataataaaatgcgtcataacaggcgaattttaattggctttaaaatttcttttttctaaaaacaagatagcctaaaagggtaaaaagaactatatagcacaatgtaccaattaataattgtggattagagagatgggaggttaagtgataagttgcataattataatactgtgtcgttaaattgagcatattcaaaggattccaacgaataatatcaaccggtccaatattataatttaataaattagatgatagactgcttcccataaagataataattgcatttatcataataactacggtgtttgaattaatcatacaagacattaagcaaataaggctgattattaacgtagaggttataatatcaacgcctgttgttgaaagcatatttataaataatgactgattatacttataagtcgcagtccaaggaactatttttgctataagtggaacagtgttaaagaagatagttacaatcatagctatggcatgtagaaaaagattataaataaaaattgtaatgaactttgcaagatatactgttcctttattttgagcatgatatagtaatgtcaaaatcgttttgttttggaactccattgagaaaatagttgaacctactatgaccaaaatcaacataattatttggctagagttataacaagtcataactaacaaattgccatattgttttcccatggccaatcccataaaaatcataaaaagaatcataaaactgataatccaccaaggcagcttacggtgacctaacttatagaattcttgttttaattccgcacgcataaaagatcacctccgcctaaatagaccgctttttaaacagtaaagcgccaatccaaaagaaaactacagcgtacactaaattagcaataattaattctgaattagtcaaatgtgttacagtaaccatctcattattcgatagttgcgtaatgatattaatcatatttaatggattccaggctaaaattgatttcaaaccaggaaaagccgacattgctaaatttgaaagatctgaaccaagaaatccgattgctagtccgattatgatcactgttgcattattcctaatcaacaaaataagcattaaagagagggcaacgataaatattaaataaatcatcgttcctcccatatttaggaatagcgcattgattaagggatgtccatgataatcatcatgccaagaaaatttcgaaccaaccatcaaggtcttgagaataaacgaaaagattatcccaaataccagtaagatgaaactataaaaaactaaaacaatgaacttagctgtataaagaatggacttatgtgatgttttgtagagtaaggttgccatagtattatttcgccactccattgcgatcatatcagaactaatagcaataatgatgataatagcccattgtcctgcaccgaatccttgagataagagtgagggcgtcattttataacttgtaccaactgtatacaacattagtactaataaaacgagaatcccatacaatggaatcttgcgatgagcaaatttatagaattcgtgtgagagattaattttcattattatctcccccttgttcttgccgtaagatgttgacaatcttctgttctaaagttaagccagttggagccaaatattctatccagatttcattatcaaacagtagcttttgaattttatctatatctttatgatcaactattacagcatcatcttgtctatcaaaaggaattttagcttgttgtagcaaattggtagtttgctttatatcagttgtttttaatttagattttggatttttttcttgagtgaatttgctcataggtgaatttataataattctaccgtgattaataatgattaccgatgtcattactttttgtaattcacttaagacgtgactggaaattaagaaggctgtaccacgtgcagcgtattcatgtatcagttttcgaattaagattgtagcttcaatatccaaaccattcataggttcgtcgagaataaccagttgcggattatttaacaaagccaaagctattcctagtttttgcttcattccaactgagtagtcttttgcctttcgatcaatataatctttcatccctaatcgattaatcagtttatccataccacttaagtctttagcatagagctttaaattatcatatccagacagaaaaggataaataacaggcttttcaattaaagcaccaacagattgtagtgctaaatgatctttaagagtaatttcgtgatcattaaaactaattgaaccagtgaatttagttaatcctagcaaagttttcataatggtggttttgcctgctccgttatgaccaataagtcctacaatttcaccaggtgaaattgtaaaagatgcatctctaataatctctttgtgaccataaaaaatatttatattgttaacttttagcatgctatcctatctcctttaactccggattagacagagagttaaatcacttttctaattaaagtacctatattaaagtctagtatcctttcctgaattgtcaaattaagtgcaacagtgtaagtgtcaatgtttttgcggtagcctttaaaccattagtctaaccttaatttcttaaatatttatatgacttaaatttctgcttagcttgcttaaataactattgccagctacctgtgcggttaatgcgccatgctggatgcctaaatgaacttcatgacgcttctttaagctgtcacgggccgctgcttttaattcctgttcagtcaatacagttatttctgaatcttcaaactcgctgctaagccaaaattccagctctcgattcttgatgcagcttaagatcctaagcatgccttctgctccagattttgaccatttcttgccttgccccttaacacggtaggtatacttgcggtggttgctctcgcagcagccaatggctttagtcacagtcagttttcgtttcttaaacggcttaatatcgtcccaatgacgatcaatataattccttaggcgccccagataatcatgattgagctcggtattcaattcatcaattagtcggctttctgcagtggttaggatagttttaactttgtcatagctgtatttgtattccaaagcagaaatcagcttgccttgcaggtcaggcgcaaaatatagcctttctttgattttcttatttaggtgaaagacatccaagaaatgctcatgacgcttgcatagccctacaatgtcatcgaagtctgttttggcatatccagcaccgccatcggcgttgctaagaattacagtatcagaaagatcataagtattggccaggtactccttggcttcgttcagcgcatcaagtcggcttaaagaaacaaattccttggcattgattcgctttctgcgtttcttgcttatattgacaatgccttcacagacctgatagcgatgaaattccaaccggcttttagtgcctttgatcaccacgccatcgccttcaagatacaaaactgggacctttttcttagtgcctgcggcatcatatcttgaatctgcttcttggccagctttaatatttttcccggccatttttaccaaattgcccacctgcatatggctaatattaaagccagacaggcaattgactgctagagcagtattgcgataagtggcaacgctgcttacttctaagatgtttttgactgctaaaatactgtagcgcttgtatttgtcaaagcccattaattcatccaagggataccttgcttgtttgcctgggcagacatatcttcttctgacatacctaacttcgccaaaagccatattgattgagcgctcattcttcttatcaatctgatagccctgtgctttaaccttggtaatcatttcatcatcaactttagctaaagccaaggccatgatttccttaatcaggtttaagaagaaacagattatttttctttcacgcttaatataattatcttcagactttataatatttgcgatttcagttacaattgaattcataaaagaccagcttctaatgtgttttttgttcttaacatcagactactggtctttttgtttgagctcaagtccaaattcaaaggacttgggcttttttaattatttattcaacttaccgtaaaaaattatacacttaggcaacagttaggctatgaagaaatatattgcttgaagagttcttctgctgtctgatattggaggattcggcgatatttgtggttaatggcattggttgcctgttgaacataagcttttgacttgtctttcatgctcttgcccttagggaagaattgacgcaaaagaccattgcagttctcatttgtgcctctttcccaaggagaatatggatgagcaaagtagatctgacatcctttgattttggtcatatccgcaaactcagaaccattgtcaaacgtaattgatttaaaccaattaggatgtctgtcaatctccttttgaagcagtctttgacaagtactggcccgatagtcaggaattttgataacaacctcaaaacgagtggttctttcagtcagtgtcattaaggcaggttgatttttacgtctgacgcctttaaccaaatcgccttcccagtgcagggaaacttttctgttttcaacttctttaggccgctgttcaatcgaattgccaagattctttttatgcggagcatggccaccatgactatgatggcgtttgtttctgcgtcttttaagcttcattggcaggtcgatattgcttatatccagcaatccttgatcaatataacgatagacagtgggcgtgctaggacatggataatttggcataatcctgtgaaattcaccaacgaattcatcaatgctagtggcatcaaatttggctttaaagcgtctgcttagcattctgaaaaagacggcatagtgttgcagtggattacgcttatagcagtttctgcggcgcttttcatgataaatttgtgcagtaatagtgctcatacaagacatagctgctgtctctttgcaggacactgcctcgtctaatttcacggctgatagttgatttatgacagcctacttcttgagcgatagcattgcaggaggttatgccagaatcaagcagagcttgaatttgtccacgttgttcgctgttcaattgatgataatgcttggaaatgctagaatttgagttggtcatgaagatcttcctttcttgatttttggtcacttcaagtttaggtcttcatggcctttttgtttaacacttagtgttgcacttcaattttaaatccgggtctagtatccttttaataaatattttttactatgttcacatatgaacaataaatttaagattatctctaataaaaccgattttaggatttttttgaataaatttgctttatttgtttaaatgcagtttcaaaaccatcttttagagtattcaagccctgcagttctaaagcggcccacatcaaccgtaaattgcgatcatcatttgtttccaaaaaatttaacataaaatgcatgtatttgtatcttattttttcaaaagcaaacctgtctgtaatatctaagccagaaattattgcatctaatctttttgccttctttagatcttttttaataagaatatattctgcattaatcaaagtatttaaaatagctgtagaaaatttcgaaactgtcaaatcttttgtgtaaatagttctttctcgtaaattgattttttaattatttatttaatcaaagtaggattctaaggtgtcctgaacctgaccaaagcctttatgaattcgattgaaataacggtcattgtagctcattgcctgaatgccaataaaagcatcaagcgactgttcagttggaaactctgccttaggcttagctttgcgcttgatcacattgttaaatgattcaatcatgttagtcgaataaattgaagctctgatctgcttgggatagttataaaagaccagcagatctggttctatgtctttcaagcttctgataacatggctgtaaaccttgccccatttggtatagaagtcatgcaggacagctgtggcttcttctttgtttgtctgttgatgcacctgtttgaattcgttcatgatcttttcacgatcgtcgacgcgtactttagcgcagatattgcgcatgacatgaaccaaacagcgttgaaaatgagctttaggataagtcctggccaaggctgttttcatgccaacaacaccatcagaaagaaaaagctcaacttgctttaagcctcgggatttcatgttttgaagcatatctgtccagacttcaatgttctcgctaggcgcaatgcagtagtcaatgacctccttgtgcccattaggcttgatgccaatggcaatatagactgcttcacgctcaaatgtttctcggcgcaaaggaaggtatgtcgcatccaaatagacgcagaaaaacttgtcgcttagcttgcgtttgtggtaagcctcaacctttggaatcatctgcttggaaatatttgatacctgagctggactgtaatggctgccatacatcttttcaattagatcggctatttccctggtggtcacgcccttggagtaaagcttgataatcatgctttccaagatatccgagtgctgcttgtagtcaggcagcgtgtgctgatgaaattgaccgttgcgatcccgaggcacttgcacttcaattgggccaaattgcgtatcaactttgcggaaataagcaccatttctagagttgccagtattccagccatttctggcatagggatcatagcccagaaaggcagtcaattcagcttctaacaagttattaacagcctgttgtagctctttgcgcaataaatcatttattttgtctggattgaatagagcttgagcaaaatctttggtaaaatcattcatgaaggagttcttctttctgtatgtgtttttttgttcaaaccaatcatacgagaaaggaactcctttttctaatgtttaaagaaataaatttaaggaatcattcatccttacacaaactattttacagtctcaaaatttcatttccaaatcgttattatttttaaaatagaaaactagtgaaaaagataaactataaatagttcttgggctaataagattctgagtattaccaaagaagtacacatcatcgtaataccaaacttcatctccagataaaatttttgaaaagtacatcgataatctctttttatagttatctgtaaaaatatccactcctgtaagatcgtaataagcattacaataaatggctgcttttaaaaaagttcgtttatcgaaactgtcattttcaacttctgataacaattttttagattgcgtttttaagtaattaatatcattactttcatatgcttttgaaacttctaaagttatattttttagataattcgaaatattattattaaagaaatctattttttggacatgaattacttcgagtagtttgaatactttttcaatatctaaacctgcttcgcctctttcccatctttctaattttgaacgagaaatacctactgcttccgcagctttactacttgaaattttggttgcctttcttaattttctaaattttctaccatatgtttctttcataacccactcctagttacgttcacaaataccttcaaaataatgatccagataaaggactagttttacctccttaatgatgccttaatgcaataaaaaatcaaactcataaatattacctaaattttcatttagcgctactaaaaaagcctaataccatcatcaagggtattaggtctttattacctaggaaatactaacgtacagtttccaaacaatatgattttttatgacagtttgggcaacgcaattttctagtatgtggcgtgtgtgccgcaaacataaagcttttaagttctggaacaaatttgtaatcgcaattaggacaaatatatgccactttttgataataatttttaagtaacacgaatgacattgcaatcaagcttactactaaaatagctaccgaaatataggctgcagtgttcatcttattgatgatacagtacgcaataaatgccataccgaccaattcaacagtgatttctactgctgacaatttccacattgaacgtgttacctctttgtatctagtttcattattcatgattttcgtaatgtcagtaacttccgcaatattattgggtttacttagaaccttttgtagttggataattttcttgttttgctcttctaatttttgcgtttctgctttatttctttttagttgatcttcaagcaaaagatcgattaatttatcaccatttttatcttctagtattttttgaatatcctttaacgaaaagccaagctcctttaaaaagatgattaattttaattgttttacctgctcatcagaatataaacgatagccactttcactaactcgactgggtttgaccaaacctttttgatcatagtaacgaatggttctagtggttatgtttaacttctttgctagatctccgattgtgtattctgacattactttctcacctcaaaacttaaatatacgggtttacgctacgtcagagtcaagaataagctaaattttccgtaaaaaacttcaaaaagcaaatattttgctcttttcctattgaaattattaacattaactgtataattttaagtgaatgttcactttatacaaatttcggaggactaaatgaacgcaatcagtaatttctttcatttaaaggagaacaatacctcctttaagaccgagcttttagccggtttgactacttttgtaagtatgtcatacattctgttcgttaacccaaacgtcctaggtgccagcggtatggataaaggtgctctattcaccgttactgcattgtcggctgcctttacctgtatcgtaatggggcttatcgctaactacccaattgcttccgcaccaactttgggcttaaacgccttctttacctatactgtttgtttaggcatgaaggttaagtggcaaactgctttagcagctgttttcgttgcatcaattctgttcattttgttaactgtctttaaggtacgtgaaatgatcattgatgccatccctgccgatattaaatatgctatttccgcaggtatcggcttattcatcgcctttatcggtttgcaaggtggtaagttgattcaaaacagtgattctaccttagttactattggtagtctcaacaaccctactgtttggatcactatctttggtttaatcattactattttcttaatgattgccagagttccaggtgccatcttcatcggaatgatcgccgctgctgtttttggcatagtgactggtcaaattcccatgcctaaaggcgttatctcttcagttccaagcattgctccaacttttggtcaagcagtcttccatattggcgatattaataccgttcaaatgtggatcgttgtctttacattcttacttgttactttctttgataccactggtaccttaattggtttggttcaacaagcaggtctgatgaaggacaacaagatgccacgtgctggtgaagctctagcagctgattccagtggtatgttggtcggttctgttcttggtacctcacctgtcggtgcctttgttgaatcaagtgccgggatcgctgttggtgggcgtaccggtttaactgccgtttgggttggtattttcttccttatttcaactatcttcagtccaattttgagtgttttcactacccaagttacggcaccagctttaattattgttggagtattaatggccgaaaacttggcacacgttcactggactaatcttgaaattgccatcccatgtttcttaatcgcattgggaatgcctcttacatactctatttcagacggacttggctggggtttgattgtctaccctgtatcaatgatcgcagccaagcgtttcaaagaaatcacgccaatgatgtggattttgtttattgttttcgtaatctacttcgttgttttaaatgtaaaataattctatcttataacccccttatcttacttttacattaatatataccctcacgcgtggtgctagttaaatcgttctagacaataagccaaattataagctaaaattgcaatttccaaccggctttgaaagcctatcagactacgtgctcgattgttctcggcattgtaataggtcagaagcgaaaagtcgctttcaattgttctgcgaatagccatcaattgatgatcattgtgctttttagctcctgtcatatttttacgatatggtgtccaaagttcgtaacccatttgttttagctgttgatgcagttctttgcctaaatagccttcgtcgccaagaagatagtaattagatggatgggtattttctatcagttcaactgtctccctggcatcatgaactgatgcctttgttacgacataatcaagaatgtaaccgtcatcgctaacaatggcatgaactttgaaaccatagaagtaaattttcttggtggccttataaccaatgttggcataaccgcgaaaaattttagcacgatagtttcgaattggttggcaaacaggtaccggaaagctgtcaatgatcaagaactgtccattcaggtcaacctttttattcatttcttgccgtatctgataaatcaattgcaatagctgacgtgaacgccgattaaaacgtgagtgtgataaacaattgaaacattcacagaatcttctttgtgattcaattcctgtcttagcttgccagataagtaaagccaaaatcagactgtccgtagttttaatttgatcaatatttcgccgatgagtaaactcagccggtgcatacaaacgataccagtgccgacaaattatcactaaatctttaaaactaacttgtaaatggtggctaaaacgcttaagcttaaggcagttcaatcagatcagactcttttctattattactatttacaagtcgagtctaacaagattggacttttttattaactaaaacgatttaactagcaccacgcgtataccctcatctaaccaagtagcatgtctacttggtttttatgctaaaaagatgtctgttaatagtatggatgatgacagcagattctattagatgatataataatcaaagaaaggctgtgactaaaatgaaatcatataaaaaaattcaagctaatgttgactcctcactagcacttcaagcagaaggaatttttcaagatatagggctcaataccactaccgcaataaatgtgttcttaaagaaagttgtggcaactggtggtatcccatttgaattaaaagaaactcctgaacaaaaagcctcaagagaattaattcaaagcatctcaaaaattccccacaaagaagctaaaaccaaaaaggaaattgaggattggctagatgaggactaatgatattgtagatatttatgttgcttacattgataagcctggaggaaaaaataggcctgtattaataattaaattactaaacagtaaagcttggctgctaaaaatcacttcaaaatataaagaaaaaagtgaaaatatccgaaagcattactttcccatttttgactggaaaaaatataatttagataaaccatcatacattgatactaaaaattatttaatagttactattagtgatttaaatatcgaaaaataccgaggccatttctcaatagcagatttacgcaaattaaaagattttattgacgaaaattcaaactaagaattaaactatatgttttagttcctaaacacaatctcaaatatgagattgtgtttttatttatccaaatggcatcttttgataatcatttgacgccttatgatgttcggattcttctaaattgccgctatactattttcaacaaatcgagttatgaaagatttatttaggaggaattcattatgacaactcaagaaggaaaaactgctttaattactggttcatacggtgggcttggtacccaattcgttaacattcatgcttcacacgggggtgacctaatcctagttggtcgcaatgctaagaaattagccgatcaacaaaaagaagcccgtagaaagtacaacgtaacggcgcatattatcgatgttgatctctcacaaccagatgctgcgcaaaagatctatgatacttgcaaaaagaacggttggactattgactacttaatcaacaatgctggctttggtggtcaaggcgaattcattaaaagaagtatggaacaagacatgtccatgatcgccgttaacattgaaacgcctactcgtttaactaaattatttttacctgacttcgtaaaacgcggccgttatgcctgacccacttcaagccgtttactacgctactaaagcatacgttacaagctggtcaaatgcgttatggcgtgaagtacaaggcacaggcgttacggtaagctgcttaatgcctagcgctatgcaaaccggttttatcagtcgtggtgatttgagttcaactcaattattcgcccatgcggttagtccataaggtgttgcaaaagctgggtatgaagaaatgattgaaggcaagcttaacattaccgctggtttaactgcagcccaaaaaccattcatgaaattggaaccaatgttacctaagaagatgctcatgaacaatgtttataagatgcaagaacaaggtagtagaaagtaatcaacttatcttataatatggatcaaaaggatggtatttgaatgaatcactttattttagatggtcgctatgaagacctactctcttttaacgttgaagaagcacttaaaaaagccaatattcctgaagattgtttcaaaaaccccatccttcaatgagtgaacaacaatactacaattttatggcggctattggtgatcagattagtgatccattcactccaattgaaattgcaactacaaatccaattgaatctttctctccaccaatttttgcggcatatagtagccgtaacggagatatttttatcaagcgtctagccaaatataaaaagctgattggcccattatcttttaaaattgatgaggatagcaagcagctctctattaccctaactccaagtaatcagcaatattccctaccctcttttctagttttatcagaatttgcatttttagtgggacttttgcgcaagacgaccaaagaagctatttccccgctgaagatcacaatgacatcccccgtcaatgatgagcaggtcattaacttctttggctgcaaaatcgaatcgggtaaacgcaacaccatcacttttgccaaaaaagacttgcaggtcaattttattagttataactaagcaatgtgggattatttcaagcctgaattaactaaacgcttatctgaattatccgttgatgattcaactagtgctagagtacgtagcatattgaccgaattacttcctaatggtgaatttacaattgacgatgtagctaaaaagttaggttattctaaacagactttacagagaaagttgagtagcgaaaacactacttttcaaaaacaactgaactccacccgagaagttttagcgctaaattatttacaaaacaccgatatgacaactagcgatattgcttaccttctaggctatcaggaatttaattcgttcttacgtgccttcagcatctggaaaggcataagcattagcgaatatcgtgaaaaaatgaataaataataaaaagcagatatattttctgtttttttactttataaaggaaataatatgagatttttgctataatttactttataaaggaaataatatgaaaattgctaaaaatttactttatgaaggaaataatatgcagttaaatttaattaaccgcccacagtatttaaatcaattacttcaatttcaaaatacagaattcatcaaagtactgacgggagtacgaagatcaggcaaatcttatattttaatgctttatcgtgaatatttactcaaacacaacataaatgaacatcaaatcatttatatttcttttgaagactttgataatatagatctttatgaacctaaaaagctttattcatacttaaaagaacgaattattagtgaccaaagaatgtacattctactttttgccaatatgtatcagattggcaaaaagtagtaaatagccttcgacttaatcctctacttgatatcacaattactggcagtaattccaatctattaagtggagaattagcaaccttactatcaggaagatatgtagaaatacatgtttatcctctttcttttaaagaaatgctagattttaaacatatttctgaaccatcagagcgtcagattgataacttatatgatgaatacattaaatatggtggtttccccgcggtagtgttagcaaaagaagaattaaaacaaactattctttctggaatttacaataccattattgtcaatgatatcggctacaaaaatggattaagagaaccagaattagttgcattagtagctaaatatctagcagattcgattggtcaattaattaatccgaacaagattgtaaatacactaaaatcagcaaattttgatatctcttataacgctgtgcagcgttaccttaaatattttgaagaagcatatcttttttataaatctagtcgttatgatattagagggagaaagattctttctactcaaggtaagtattacattgtagatactggtttgcgtacccaagctttaggagaaagaaataatgaccgcggtagtgttttagaaaatatagtttatgtcgaattacttcgccggggctacacagttcaaattggtaaattagataataaagaaattgatttcatcgttttcaaggtaaatgataaacaatatattcaagtaacctaccagcttccagaaaattctactagagaaactgataatttacttcaaattccaaataactacaaaaaaatagtcatcactggccgatatgaaaatgaagaaatgatttccggtattccaataatcaatattaaagattggttattaagctctaaaaactgatcaaaataggatcgactaactcatgtcgatcctatttttaaattaaattatgttttttacaataagtaaaaattccgtcatcttgcacgctgccacagatgtcatcagcaatttccttcacatcgtctgttgcgttccccattgcaacgccgtgaccaacagtctttaacatttcaatatcgttgccgccatcaccaaaggctattgcttcgctcacagggatttgataataatctaacactttttcaattgctacacccttactaccagtagctggaataatatctgctgctctatcccaccaagctgttaccttagcattttgcgtattagctacaagtccgtcataatctttttcacgacagcctaccattatttgataaaccgtatcctgatcgacaaccacatcaaaatctggcgccactctcaaatccgttccaccaatagcaaagtattcctttaaatcctcatcaacaccattagctgcaatccgtgttttggtagctacagctaacggccgatttattttctgagcattttgaatcatatgcaagacatctccttgccttaacggattatcaaaaacaatgtcttgatcgttatagcagtaagaaccattaaaagttaaatatgcatcaaaatctacacccaacttaggcagttgcactggtggtctgcctgatgcaatacaaatcataatgccgttgtcttgtaaagcatgcagtgtctctagcattttaggtgtaattgattttttcttttcaattaaagtaccatctatatcaaaaaatattatcttaggtttgctcattatttttaccttctaaagaattttctactaattattatactttaaccgatatttcccaggaaatattaaaattgagctctcttcctcaacatctgtgctaaactagatacaattagtttctttaaaagttaatagttacggaggaatttttaaatgcagacattggaaaaagtctttcatttacaagatgctcataccactgttaaacgtgagttaatcgctgctttaaccacttttgtcagtctctcctacatcttattcgttaacccaaacattttgcacgcagctggtatccctaaaggtgccgcttttactgtaacagctcttgccacagcagttgggtgttttttaatgggttttattgctaattatccgattgccttagctccaaccttaggtagcggtgcctttttcgcttataacgtatgtgttgggatgcatatttcttgggaaacagctttggctgcagtccttgttgcttcagttttattcattttaattactgtctttaaattacgcgaattagtggttaatgccattccacaagatatgaagtatgctatttcagcaggaattgggttattcatcgcttttattggcttaaaaaatggtcaattaattgttaacagcgattcaactttagttactctgggaaaatttagtactccagcagtttggatcacattatttggcttaattttgactgttgtattaatggcattaaacgtgcctggttctatctttattggaatgattgttactgccatcttcggtatgatcattggtcaaattccattaccacataacatcgtttctggtgccccaagtattgcaccaaccttcggccaagcggtttttcacattaaagatattaatacagctcaactttggatggttgtactaactttcttattagttaccttctttgatactgctggtactttaattggaatgactgaacaagccggtatggttgacaaggatggcaagattccacggatcggtcgtgcttttttggctgattcaactgctatggttgaaggtgcagtctttggtactgctccacttggaacttctgttgaatcaagtgccggaattgccatgggtggtcgtactggtttgactgctatctttgttggtattttcttcattatcagtatgattttcagcccattgttacaagtaattccaactactgtaacggctcctgctttaattatcgttggtgtactgatggccagcaacttaaagaaaatcgattgggaaaagttcgaaattgcctttcctgcttttcttaccgttgtagggatgccactgacttactcaatttcagatggtttggcattaggcttgattgcctacccaattaccatgattgcttctaagcgttataaggaagttagtcctatgatgtatatcctgttcgtagtatttatcatctttttcttagttacgaatttataaaaagaatgctaaagataagcagtttgaagctgcttattttttattgacttgatttttattttgtactactgtaataaatatataagacagtttttatgggagaagaaaaatgagactgtaaaatagtttgtgtaaggatgaatgattccttaaatttatttctttaaacattagaaaaaggagtacgcgtggtgctagttaaatcgttctagacaataagccaaattataagctaaaattgcaatttccaaccggctttgaaagcctatcagactacgtgctcgattgttctcggcattgtaataggtcagaagcgaaaagtcgctttcaattgttctgcgaatagccatcaattgatgatcattgtgctttttagctcctgtcatatttttacgatatggtgtccaaagttcgtaacccatttgttttagctgttgatgcagttctttgcctaaatagccttcgtcgccaagaagatagtaattagatggatgggtattttctatcagttcaactgtctccctggcatcatgaactgatgcctttgttacgacataatcaagaatgtaaccgtcatcgctaacaatggcatgaactttgaaaccatagaagtaaattttcttggtggccttataaccaatgttggcataaccgcgaaaaattttagcacgatagtttcgaattggttggcaaacaggtaccggaaagctgtcaatgatcaagaactgtccattcaggtcaacctttttattcatttcttgccgtatctgataaatcaattgcaatagctgacgtgaacgccgattaaaacgtgagtgtgataaacaattgaaacattcacagaatcttctttgtgattcaattcctgtcttagcttgccagataagtaaagccaaaatcagactgtccgtagttttaatttgatcaatatttcgccgatgagtaaactcagccggtgcatacaaacgataccagtgccgacaaattatcactaaatctttaaaactaacttgtaaatggtggctaaaacgcttaagcttaaggcagttcaatcagatcagactcttttctattattactatttacaagtcgagtctaacaagattggacttttttattaactaaaacgatttaactagcaccacgcgtaaaggagttcctttctcgtatgattggtttgaacaaaaaacacatacagaaagaagaactccttcatgaatgattttaccaaaaatatggctcaagcactattcgatcaagacaaagttaatgattttttgcgcaaggaaattcaaactgcagttaatcaattgcttaaagttgaattgactgcctttctgggctatgatccctatgccagaaatggctggaatactggcaactctagaaatggtgcttatttccgcaaagttgatacgcaatttggcccaattgaagtgcaagtgcctcgggatcgcaacggtcaatttcatcagcacacgctgcctgactacaagcagcactcggatatcttggaaagcatgattatcaagctttactccaagggcgtgaccaccagggaaatagccgatctaattgaaaagatgtatggcagccattacagtccagctcaggtatcaaatatttccaagcagatgattccaaaggttgaggcttaccacaaacgcaagctaagcgacaagtttttctgcgtctatttggatgcgacataccttcctttgcgccgagaaacatttgagcgtgaagcagtctatattgccattggcatcaagcctaatgggcacaaggaggtcattgactactgcattgcgcctagcgagaacattgaagtctggacagatatgcttcaaaacatgaaatcccgaggcttaaagcaagttgagctttttctttctgatggtgttgttggcatgaaaacagccttggccaggacttatcctaaagctcattttcaacgctgtttggttcatgtcatgcgcaatatctgcgctaaagtacgcgtcgacgatcgtgaaaagatcatgaacgaattcaaacaggtgcatcaacagacaaacaaagaagaagccacagctgtcctgcatgacttctataccaaatggggcaaggtttacagccatgttatcagaagcttgaaagacatagaaccagatctgctggtcttttataactatcccaagcagatcagagcttcaatttattcgactaacatgattgaatcatttaacaatgtgatcaagcgcaaagctaagcctaaggcagagtttccaaatgaacagtcgcttgatacttttattggcattcaagcaatgagctacaacgaacgctatttcaatcgaatccacaaaggctttggtcaggttcaggataccttagaatcctactttgattaaataaaagattaaaaaatcaatttacgagaaagaactatttacacaaaagatttgacagtttcagaaaaatgaaaatcaaaaaagtactactgaccacgtctttactcacgattagtttgattactctatcgggatgtagtttccacctgtttaccaacaagaattccggtcctacaatcaaacgaactttgtcctctaagaaattcaattcacttaaggtagccagtgacattactgatgttgaattacatgcaagtaatcaatacaaagttatctatcatgggctcaagcgtttcaaacctagcgttaatgtgaaaaatggtcagttaaagatcactcaaactagtaatggtgtttcttataacatcaaagaaggcaatacagtggcaatctacctacctgccaaagaattacaaaatatcaatattaatctttctgatggcgatatcgatgctgatggcaaggttcaagcaaaaaatgtcaaacttcacagtgacgatggtgatgtcaactttgacgatttaagaattagctctggcaaaattacctcagatgacggcgatatttcagtttctaatctacttactagaaaaggcgccacagttgaatcagatgatggtgacattcgtattagaaagagcaatgccagtggttaccgcctaacttctgacgacggtgacgtcacattcaagggagatacttctgataatgatgacggtggttcttactacaaaaatactaagagttctaacctgctctctgctcacagtgatgacggcgacgtcaacgttaactaaatttcgtcataaggcgataagtttcacatgaaacaaaaaatcaatgcatcattgataatgcattgattttttacttttttcctcattcatagcataaacacgactttacaagattatttaagtttctattgaaatagacataattttaatacgaaaaagataagactaaattctacttttccattaaaaaatatttaccaattttccattttctaagtcaaaatgatgcgtaaatttcttcatcgtcgttggtgaaatatggtggtcaatttcaattactgttaatggcgaattcaaaaagacattatgaatttgctcagcagtttgcggatcaagtgaagcagttccttcatcaactactaaaatttctctttggaatagaaaggcacgcgctaattcaattctttttctttccccacctgaaagattatgcccatttttttcaattacggtatctaagccatgtttttgaacgtaattagttaatcatgcttgttgaaccgcagccatgatttgtttttgatcaaattgtttaccaagagttaaattaaatcgtaaagtctcattgaaaatttgcgaagtttgttgaacttcactaaaaatttgcgtttcaacagactgattattaaccaaaactcttcccttctgcggagataatttacccattaacaccttaagcaaagtagatttaccttcaccggactttccagtcaacagaattttatcccctctattaacgcataaactcacatcattaagcactggactatcagcttgatagccaaaagttacattgtccacatctaattgctcaaatttgattggagcctcatcttgcttagttgttaaaggtttgaaagacaacaacttagcggtcattggtttagtggcggcaatctgattacgaatactattaatactaaagaaactatttacaatccaagcactagagtattgcacggccacaaaagaagccaaagcaacgtgtccttgaattaccataataattccgactccaatcggtaagaagtctagtgagtaagctaataaattaacgtaaaaatcactcttagcaattgtatcgtcacgttcacgtttattctcaacagaatttttgattactttactactcttttttacaaatagagataatacattgtaatttaaaaccgtattgatatttttgagtaaatccgacataaatgttacataactacctgttgatttactccaatcggatgactgcttggctgttttcttgctaaacaaactaggaataaagcttgaaagacttgcaaaagcaacgaagactaatgtcaagactacactatttatcagcgcaatagtaacgatcccaacgattttaaccacagtagatactagtgaaaataactgtctaaagtacttttcttcaatcaagttaagatcattattaatgaaagaaattcgattagaaatttctttttctcctgtttttacaaaatccgtttgcatcaaatgctcacgaaccttttgattaaatagtgctacgttacgattaattactcaattatttaagtattctacaattacaagtaagatttgtaacactgtaattacgataatcattctcaccgtatttggaatacttttccttgtaactaacgcaaagatttcggagtatgaccatgtgctaaaaggcaaagaagtccgcttaaacatgacagaataatactgagcgaaaaccatttgaggtcaataaactttttcataaatgaatctccctttcaattaagttggattcattatctgctttagttcacgataaaaatagctttctgcaaaagtgatcttcaatctgcatatatgcagattattctggaagaatagacagaatattttctaaattacttgccttgatcaatttcttaatagctaatacctgctctgtatctccagcaaaatagcattgataaaaatgaccaatgattttatataagactaaagatggcgtttgacttaattgcccaagtaaataaataggctctttattatcttttacaaatttattttcagcacaagtatataaataattcacacaaatagtggcaattgttgtttgcattttttctgtctgctcagacattttatcattataagtagtgaaaattttttgaaagaaaaaagcaaaatcgtcatgagtaaagatagaggtaccaaaattggctaacaaatctaaactaaatttatcttgaagccaattgtcgcctgcaaacaagcgttgcagtactatatttttatctttgacatcaaatttacgttttctttctagcaaggtaagaatcaacttagctttgattttcagaagatcatgatgcggcagttgttgaatttctgttaccaattttctaacttggttaaagtcttgattataataagcagtctgtaattgatcacctaaattgttttcatcgtcagcttgtgcgactgaattttgcttaaagaattcatcaaatgaaattttatttttctgcaaaattgccattaagtccttagctgatatttcatgcaatccgcgctcaatcttagaataatgggcaggtgataaaattcctgttacaaattgttcttgcgtcagtccccgcgattggcgcgctttttttaatgctgtgttaatttccatagctgtttttatttcaatttacggtcccttttagatacaaaccaaattgtcccatcagaagttgcccagtgtccatcagaagttttatgaaatttcagcgtcagtttcttactgtgtagtgtccagctatttttaccttccattgtgacacggacccggcctaatttttctgaatttattttgttattgtagtctttgggatcatatgaattatgcccatatactttataaattgcttttgctgccgcagtatttggcttaatgtatttataagtaccagatgcatcagtcttaaaaactgggctggatgcatcgatttgaccactatttttccccagagctatgttcaccaacatgccaagatgattttccattacagaatctgtttgatggggatcataggttgtaagatttttattagcaaactgttctggaatagtttgctgattgcgataaaacaaccagccaccgactgccagaactacgactactacaacagttatgattgtagctttctttttcataaaggatcacctgttatctatcagcttttttctgaaaagtaattaatccgtgtgaaactaatctaacagttccgccataataaactacccaacgtactttgccattactgtactcttcatacattctctcccgctgaagatatccattatatgtaccatcattataaggaatttccatcggagtatctacagcaccatcataagcgccataacgcgtcttatgccatgggcctgttctcttaactccatgaacttttttagttaacggtagtttttgaacgttttgaactgaatctgtactagattccgcagcagatacaacagcagtattagtggttgcaaacagagcagttgctgagaataacactaaagttgcttttcttaatttcatatctaacaccttatacctttcttttattgtttattttcattacctagttgttcattatcattgacaacaaaatttgtcatcattttctttttacttgctaatgtaggaattgggtagcttttaagtttagtattatacaaatagccaccgtacataattcctgttggattatgccccattggaacagtgtacatcttttccagatatcctctaaatacctcattgcctcttcttacagtgtaataaacataagtaccctgatcatgatagtattgacgttgataccagatatgttcaacaaatccttttgattcagtgctttgtgttgcagcttgtacatggtttgattgaaccaaagctgaagttgaaactgatactagtgataaagctaatgctgctttagctgttaaagttaaaattttcttatttcttttcataactttaacctactctttttttcttttcttgctttaattactacctaatccagacggaataggaacccatggacccatatttttctctcctttcttatttatttttcattaattttactttcactactaagaactgttcagaaattgtcaaagatgacaattttctacaataaaattcttaatcaaatgagacattccattacttttcataaattcaataatctgatctacttcttcatttttgccatcaaaacaataatggtaataattggcaactattttagcaaaagcattacgtggaatttctggcaatttagaaatgaaatcgtaaattagatttaaatcaattttccttctttgtacgtatacattagccaaataattaatagctattgctgacattatttcttgtagctgaccagacagattagatacattatggcgatacgttctaaatattgaattaatcaaaaagtccatatcttctggggcatatatcatcatagtcattgcaaaaatttgtagagtagattcactccactcatcagaatcaaagacaatttgtctaacttgtcgtttaatattctcagatatttgatcaatttgtttctttaaagatgctattgaaaataccactaaagcataaagattaaatatattctgactttgatttttatattttccaatttcaattttcaaatcttcaagtcgttcgatctgctgatgataatatgcatcttctaattgcttttgccagatcaaatttttgtgagcaagatcattttcactatcttcattttctattcgctctaaaaatatagaagcttgcaatccatgttgctttaacaaatcaattaaatcctgagtctgaatatcatttaatccacgttcaatttttgaatagtaagatgttgataacacatcccccgccatttcagtttgtgataatttcatactttttcttgtttgttttaatgcttcaccaattgtcatatctttccctccctcgtattatcatatttttcattattgtataatgttttgttaattttgcaatagtttgtaaaacaaaagcattatttttatttttcaatcttttatgtttacaaatgtaaacttagcaagtagaataaaaaatgtgaagagatgaaaataaattatttaatttggaggttacggtcatggatgtaactaaaatcattatccttgttgtcgcaatcgccttgatcggctttatcctttggtggttcttcggcaaacatgacgaagctatcggtaaagcaagtgttaatcaaggcacacaagaagctaacatcgtcgttaacggcggttactctccttctaccattgttttaaaacaaggcgtaccagctaaggtgaattttgatatgcaagactctaccgcctgcttatcgcacgttgtttttgaacaacttggcgttaacaaagatttaaccaagcaaaaaatcactacaattaatatcccgactgataaaaaaggcacttataacttcgcctgcggaatggatatgtttcatggaaagattgaggtcaaataatgagtattttttcaaagaatcaaatcaaaaaagttgtcgttaatgcagataatcacggttacaagccagatgtagttaccttcaagcaaggcaagcccgcacaattgaaatttatcccatcagataatatgggctgcatgaatgaaattgtatctaaagacctgggcttcgatcataagctcgatggtcaaaaagaagttgtggtagacatccctaccgaccacgcaggaacttataattacgcatgtggcatggacatgtttcatggaaagatcgtagttaaataatgaaattatctaatattcagcgtttctggatctcctttgtactctccatcccgatgctcattcagatgattgccatgccatttcactggatgatgccaggatacaactggattgcccttattacgacaaccattatcatggcaatctcagctgcaccatattgtaagagtgcttggggcgccttcaaaaagcataacgctaacatgaatacgctagtggccgtcggtactgctgtggcttacttttacagcatctacgctatgttcactggccgcgaagtttacttcgaaagtgctgcttatgtaacggtctttgttctacttggggatgccatggaagaaaaaatgcacagcaacgcttccaacgcactagccaagttagtcgacctacaagctaaagacgcagcagttttacgttacggtgaatttgtcaaagttccactcgaacaagttaagccgggtgatacaattcgcgtaaagccgggtgaaaagattccggttgatggtgtcatcactgatggctcaactaccatcgacgaatcaatggtcactggtgaaagtatgccggttactaaaaagaaaggcgacaatgtcgttggctcaacgattaacaccaatggtactttcacttttaaggctaccaaggtcggtagcgatacgatgcttgctcagatcgttgatttagttaaaaaggcccaaaccagtcatgctccaattcagaacttgaccgacaaaatttctaatatctttgtcccagtcgttttaattattgcaattattaccttcgtaatttggtatgttttcttaggcgcaacattggttaatgctatgctcttcgccgtttcagtagtcgtaattgcttgtccatgtgcactaggtttagcgacaccaactgctttaatggttggtactgcccgtagcgctaaaatgggcgttttaatcaagaacggtgaagttcttgaagaagttagcgacattgataccgttgtgtttgataagactggtacaattaccgttggtaagccacaagttactaatgttgtaggtgataaaaacaaggtcttaactattgcagctagtttggaagaaaattctgagcacccactagcaaccgctgtagttaaagctgctaaagaagcaaagactgaaattaagtctatacaaaactttgcagctattgaaggccgcggagttaaggcaaactatggcaatcaagaagcttttgttggtagcgatcgtttattagaagatatttctatttcccaggaaatgaaagatcaggctctccaacttcaaaaagaagcaaaaactgtagtctatgttggcctaggtaatgacatcattggcttaattgccattcaagatgtacctaaagcaagttctaagcaagcaattgcggaacttaaaaagcgtggtttaaagacggtgatgcttaccggtgacaatcaaaatgttgctgaagctattggccgtgaagtcggaatcgaccaagtaatcgccggtgttttaccaactgaaaaagccgctgagattaagaaattgcaggatgaaggcaataaagtagcctttgttggtgacgggattaacgacgcacctgcattgtctacagctgatgtcggaattgctatgggatcaggtaccgatattgctattgaatctggcggtatcgtccttgtacagaatgacttaatgggcgtagttagagcgcttgagatttctaagaagacctttaacagaattaaattaaacctcttctgggctctgatttacaacacgatcggcattcccattgctgcaggtttattcatggcctttggcgtgcagcttagtcctgaacttgcaggcttagctatggccttctcttctgtttctgttgtaactagttcacttttattgaataaaacaaaaattgctggtgaaacagctcaagtttcaaagtaaaataattctccgaccggatattttaatccggttttctttttgtaaatttttcaatttgcgacttaaagtttcagcagtaatacccaaatatgatgctaagtctttcttttttaactttaattccacatttttactcccctgtttttgagctaagtcttgcaaataggccattaagcgttcctgagcatccattgaattgcgccgaatagagttagtttcgattgtaaccagctgctcgccaaaattattaagcaaattcaatgctaaatctggcgtctttttcaataacttttgaaaatcacgacgctcaatagaacaaacataagtatcttgtaaagcctgcacaaagttttcctgggcatgttcttgaaaaagattctgctgtccattagcatcgccttgattcagcacacctaatacggtctctttaccgtcttcgttgagattgtaaatcttggcactgccttgatccataaaaagcattccgttcttaccatcacctggttgtcgaataatactgccttttggaaaatattcttggtgcgttgaaattggtactagtttttctaacatttcatttggcaaatttttaaatatggctgctttgcgaatacaagccatgggtgaatgttgcataaaagcctcatttcttgatctaagtcaatttatttttatctgcatcttaatacaatgtatttaacaactcaagcagaaaggaaatattaatcatgactaaatacatcgcacatattgagcctttaaacgctgaaaaaattggtactaaggcacacggtactgccacttttgaagaaaaaggtgatcaactacatattcacgttgagatgtttgatactccagcaaatattgaacactgggaacatttccatggcttcccgaatggtcaaaaagctcatgtaccaactgcagctcaagacgttaaccatgatggctttattgatttaccagaaactgagccggtctcaggaactacaatggtgccacttgatgatgccccagaaaacatgaatattcctcatgatggttatcctgttgccgacagtaatggacattatgaatatgagattgatgtctcattaacaaagctacaaaagaaattcaaagctgcctttggtagcgataaactacaactagacaagcgtgtagtttacgttcatggtgtacctgcagatctggaattacctgatactgtaggtggttgcgtaatgagttatgatgcccatactaccttgccaatcgcagctggtgaaattgaaaaagcttaagttaaaagccattccttgtgaatggctttttgcatcctttcttattttttgatagcatagatatagattatgtaaagtatctaagaaaaggagatgttttataagtaggcttagatcctactcttatggagaataacgaaaaaattatccaagaaaagaaacgcgaaaaatttattaaaactaaaaagaattacaagcgtgcaccactaatgtcagttcacttaagagtgatgatggccgttatcttaggtcaaatcgcctgtggctattccctgggaattagtggtaccgctctttctaatgcagctaaatatatcaacattagtgacttctggactggattaattggggctggtgctttaattggccttgctggtagtcttttggtcggtcgactttctgataaaatcggtcgccgtaaactcttaatgtggaatatgtatatattagctgctttttctttattacatctaataaccgctaattttagcttaacctttatcctccgtattggaattggtttaatgattgctgttgactatactgtagggaatgccttgttaaccgaatggctacctaagggtgaagacagcaagcgccagagtcatttattaatctactggactattggttttattttgtcttacctagctggtagttttatcactggatttgatagttatacttggcaaataatcttagcaacaagtgcagtacctgcactagtaactgctatcttcagaagtcttttcccactccctgcttcaccaggctggctagcaagtaagggtaagattaagacggccaacaaggtcattcgtaagcacatgggacgcaaatggagattacctgcccgctttatgaagcggaataaaaagaaaactcctagaaatatttcctgggcaattttattttccaagcaatatctgcgacgtactctagtaggtgggattttctatgcctgccaagccttctcatttttcggtattagtatcttcttgccaattttattacaaagcatgaatatcactagtggaaatatctcaggaattatctacaatggtgggatgttcattggtgtgctaatcggtacctggatctttaacaaggttagccgccgcttctatcttatcagtaattttctaatctcaggtctgctaatcggcattttagcaatagtacctaacttaaattcaatacttaaattaggtatttttacgttatttgcgattattttatcagctggtttgatcctagattatccttatccgactgaattatttgatctgaaggtacgagcaactggtgtaggtacttgtattacaatcagccgaatcggggctgccgcagggactttcttattgcccgtcttaactaatgtgggtggtgctagcctggcaatgctagtttgtgcgattgttttactctttgcctttatcgtttgcctcatctgggcaccggagacctcaccccaatttatgaaaaaataaaataattaatatgctacacaaaaagacagattacatatgatgcaatctgtcttttcttatttcttatcttttttcttcttgtccttagaatccttatttaataattcttctggatccttatgcttaggcgtcttctttggatctggtacagttgcaaagcgatcaagcatcttctgtaagttattagggttgtcaaaagttaatcccataaaacatcttcctttcgttttctcaattatattaaaatttcaattcaaatgacaataattttaaccctcattatcaataaattgttgcatcttaatcatttctgaaccagccagatcaacactaattaaatcactataatcatgaacactagtatctcctaaaccatattcagttacaatttttaggtcgaagccactatcagagcgatcttcaattaagcctaaacgatcaggataatgataaattgaatcactaattttcactatttgatcttcgggccaattatcaataatttctgctggtgactgaatttcatcccgtaatttaactgaacgctccagcctgtccggatcaaaactgccattatttttttgccattgaactaaaaaattaaagaagagcaagcgctcggaatcttcagtaatatgcgttatatggctcctagcaatcactgcaattgattcaacctgccctaactcattgatgctctcgaataccagattatcatcgtcatacttgagtactttaccaatagcaaaactaccatattgatcatcaaaggtataatcaaaataaatttcaaccagatccaagtcgttagtgaattcttgcttctgtgattgccgcaaatattgggtaaataagcgattatcaatggcattagtatcgacacaaacaatatcgtcaagtggtataacggtggcataatgctctaaagttaattcattgcgttctaaaatacgcacctcttgctgatcaagttgagtaattaagccagtgtaagtagcacctgtattcacctcaaaagttgtaaagggttgcgcgtcagctacgttaatcagtaaatcatgcagattagtaaaatcccaggctaacactgtcttatttaattgctctaagttaaatgaatccttaacttgggtaatcatataatagcgtagattaggcgtatcgtcttcaatcttagctacttgatcttctttaataaagactattccacctaaattaccgccttgatcgactgattcaaaggtaatccagccatgatgttgcgtgataatgcggccaatatagtaagaatttgcatcaactaccgtaatacttgcatccccacctaagttatatttttcttgatcagccttaagcgtgatttgtacaagtttattcaatttttcgccccctcttttttcttccgtgaatttaattgtcgcctaatcattatttttctgcaagaaaaaagaagatggtttagccatcttctaatattgagttaattctgtagaattttggggctaacgaatattacttcttttgtgcagctgcctcagcttctgctgctgtgtttgaaggggttaacgaagtactgtttggatcaaaacgcacatcgcttgcttttacataaccatcagcaaattggacttcaccttgattactatagacagatttaccaactaagtgataaaacagttctgccttattttcacttggtacccagatgtaaagcaacttatttaccttgtatcttccaccttgttttctaacttgatcgcccttgaagtcaatcttgtttccgttagcatcatagatatcagttggcttaataaattgaattagtgattttttagtatgataataattttgaactggaatatctttagcagctttaacattgaaattataaatccaataatcagttcccttaatatgatagattgctaattcgttgtcatcgtcaccatctctaccagtatcagcacgtgtcccttgctctaaacgatccactgtaaacttatcaccttgttttgcgtattttcctgaaggctgaactgcatctttatcaggtacttcaacaaaaagagcagcacgtttatcagttacagtaacagtcgtttcttctgatttagttgtttgagacgaagaagaactagtgttgttatttgtattaacactaattacaggacctaaattataagacttaatgtactgtttattaggtccacctattctaaagtaatgctttccgttcttaaatttgtatgaaccgccataagtcgtgataggtcgtgatagtttcacccttatacaatttccaacggttattgtaagaggttctgccagttgaggtacgataaatgtaagtattatgagtaatcttacgtgttacaccatcaatgttggtagcctttatgtattgatccttgccgcttactttatagtaaagcgagccgtcaattttcacagggttgctttcaacagtgacatattgataggcattgtattttacacctgtgctgttaccatccttgtcgtaagctaaagcagtatgcataactgctttagtcgtagcagcttgtacttcattagttgtattagtcaaaacagccaagggtgcaactgtcattaatgtagctgcagaaattaatgcaatcttatttttcttcatcataatcatccttttcaaatctctacactgctattatattctctaaagctaattaaagcattaaaaagaagccaattaagtgaagtggacttctacttttgatattttcttttaatttattttttcaatgccgttgcctcagcttctgctgctgtgtttgaaggggttaatgtcaaacctatattaacaaatttaacatcactagctttaacataggcatcattaccaacttcaatttgatcaacgttacctgtagcatagaacttagtaccaactaaatggtagaataattctgccttgttttcacttggtacccaaatgtatatgagtttatctactttcagatttccaccttgttttacaatttttgcgccattgtggttttgcatagtaccgtcagcattatacacatcagtatccttgacaaatttgatatagccataatgttcgtgatcataatcatgctttactaattttttatcggcagttacatcaatagctaaaagccaattgtctgtaccttttattctatacattccagcttgtgctgcagttgatggaaaatgatcagcaaacggagtaacttctagtttatctacaataaacttcgtaccagctttgagattctttttgattgctttaccttgattatcataaatatttacaccgtaagcattttttacggtaacagttgcttcctcggcattagtattagtagcgttgtttgattcattgctggttaaatttgatgcagtattagtactaataactgggcctaaattatatgatctaatatattgcttacgtggcccacctactctaaagtaacgtttaccgtttttaaatttatatgatccaccatatgtagttacggtttcacctttataaaatttccatttcttactgttggcagtcataccataaggtgtcctttgagtagaagtccggtatatataagcattatgagtaatctttcgggttacaccatcaatattagttactttgatatattcatctttatctgtaactttgtaatattgacttccattgatagttactagttttggatctacatgaacactaccataaacgtaatatttatgaccggtactatttccatctttatcataagctaatgcgttgtgcataatagtcttggttattgaagaatctgcttgtactgtatgagcgctagttgtagtactcaggataggtgccgttcccattaaagctactacagaaattaacatgattttattttttttcattattaaccaccctttgaaaatctctatacttcaattatcttactttgtataaacttagacaacaaaaatagcatcaaatcatattgatttgatgctattaaggctaaaatttacaaatttagtcccaagctaattcataaaccttatttgaaacagttttatttttaccgttaacattagcatggtatgcaacagttaagtaaccgtgattttcatcaataatttggatactttcaacttcactatgttcacctgaaatatctaatccaccaaatgcacttaagtttacattttcccattgagattgatcattacgtgcataaaacggaatttttacaatttccttgtgatagtatgaccatgaaccattacttaaacttggtgatttttgactagtaatataaatattaccagaattatcaagatcataaccttgtacagagtttaaaacagatccatacaaaccatatactgtaaaactagtttcacattgataatttcccatatttacgaaaccattatttccagcctcatctaatgcattattaatgacatttaggtcataaattgaaaagtggcctgttccattattctcaatagtagcaattaaaagcatactataatctggtgaaactgctacttcagcgcgttccatttcatcaccagagcattgatcttcaggattacctgcgcggttcaagtatgctaaacgtgggaattcagtatttgatgaagcatatgatttgtatctaatatctgctcgagcaatttgagaagcccatttattcttgtttttagtaccaacgaaccatttaccagatctacctgaatattcccaagtttgggtgtgtccagctgctgcacctactaaagtaagcacaggggttgtcacgttgccacggaagccacgcaatacatgtgtttctgtctggttatttcttaactgtaaaccataaacatactttgatcctacattacctttttgaactacagctctgtaacctgtattcatatcgaatctatctaaaattctaatatttgttgcatctaacataataaaacctccgaaaaatttaaaaactactacttatcctgagtttgctcattcatctgtttagccacttccgcaaagatgtcctgcacttcttgcctgttcagcttgaagccttttgcttcaaggctgttcactactgcgttgccaacacggttaatcttctgttcgtcagaaagattttctttgtcgtataagcgtacatagcttttcattaagctatctgcagtattgcggaattgctctaagcgtttattcttgaaatgaactctgctcaagatgccaatacctactacgctaattacccataacgccagagtaatcagctcaacgtaatcatgaatatccataattgaatgaatcacctctcttttgatcaaacgatccaagggggctaacgaatgtccattggacttcacctctgtttgataatgttcaacaagacactaatacacttgatttatattagtttttagactaatataaatgtataagaaataaccgaaagctggtaaatgttccgccaagaattttattaacttaggttgttttctttttcatatctcgttgacaatatttactataagttaattaactaattatgtcaataaaaaaagctaaaaaactattattttttcgaacaagtattcttgaaaggcttggtatgattgagttagagcgcacaaaagaattagcaaaaaaatacaaaatgaatctccgtgaagtaaatgacaaggcaggtttaggtagaaattccatctataattggaagaatcaaagaccaggaattgatgcacttaatgcagtcgcagatgtactacatacgtcagccgattatttaagtggtaagacaaacaatcctagcccgtcacctaaaggtgatgaaactggtggtatttctattgatggtgaagtaccatatttctatcatggctacactattccagaagactacctgaacatagttcgtcaacttatggaacgtgatatcaaaaaaggacttattaaacgacatgacaacagcagatcagaataaacaagaactcatagactggttattagcctatgctaaaaaacgtgatattatggttgaattagttgaagtaaatccaacttacccatccatttctttaaagaactatagattcgctgtcattaatactaattggcatcatcaagaagaagtaccattttcaataggtcatgagattggtcacattatgctgactaatggtgaagtagattctcgtcaatatatcacttttacagaacagaattccgaagaaagtccagcagacatcttttcaataaagctaatctataattactcctgcaaaatgggtgattgcttcgaagatacaggtttatttatgcaagcatacgggataccaaatcgagtagctgatgcaactaaagagatatttaagcgagcagcttaaccatcaacttctatattgatttgattactaaaagttttagcattagtttttacactacttaaaatccaattaaacaaaaaatcgctactcaattgagtaacgattttttctatccatccagttcaacgccttgcaagtccttcatcttgctataaaccgcgccacgttgacttgaatcaaactccagaataagcatatctccgccgcgaattacggtttgaccatttggtatgatctcatctccatcgcggtgaattgttcttaccctagtatcaaccggccattgaacctcagaaatggttttatcaaccagtctactgctctcatagaccggcagagccattgtatcagcctgaccagtatagttagccttatggtcactactcttgtccatagcggctgctagaagcccgtagataggcttaccgccaagaagttcatcaactaataacgcaatgaaggccaccacagctaatggcatcaagtgaagtaaggaccctaccatctcagtaattaagataatcgccgtaaatggtgcacgaatgattgctgcaaaatatcctgccattgaaaaaatcactaggttaactactaaacgctgcggtaacaagcctaactgtaccatcatcagtccataagttgcaccaatcaaagcgcccattgtcaaaattggcaggaagataccactaggaagacctgaatcataagcaacaatggagaaaacaattctcatgacataatagaaggctagcatccctacaatgccccaacctgttttagtgattatattcggcaatgccagaattaaccgattacctggaccggtgattaatggccaaaagtaagcaatcgggattaatattgccaaaggaataagtccatgcagccaacgaggtaaaatggtgattttagcatagaccttctttaaactaaataaaccaactttatataaatgacccaataagcctaataaaatccctaagataagcaagtgccagtacaacgaaatcggaaatgaatagttatattgaattgctagggcgtgacgaatgccaaacaagtttgaaacgacaaagtttgaagcaattgcgccagctaaagcattcatccaaactaatggtgaaaagttatggaatacttcttctaagacaaacaaggcaccactcaaaggagcgccaaaagcggcagacaaaccacttgaagcccctgttgcaagcagaattctagtttttaatttgttctgcttgcatccctgagcaacaccttgaccaattgtcgagcccagctgcaatgatggtccttctggtcctaggaatagccctgtgccgataaccaagataccaccgattaatttccgccataaaattggaaaccattgtagtgatagcttcccttgcagttgcaattttacttctggaataccagaaccaccaacatggggatattgtttaacaaaataaccagcaattaccgctaccgcaataaagccaatgataatcgcaataaaccacaacggattctggtgcgctaattgaaacaagtataaccaaaaaccagatgtcttttcgattccaaatctaaataaaccaactactacgccggtacatattccgacaagtagtgcttggagcaacagtttaatattagttctgtttgcctcgtctttcattactttctccctcacaataaaaaaaacgtgtcacaaactattgtacaacaaaaagccagctagaaatgttccaatgtcattaagttaagacattgacaattaagggtgcttttttagagatcgaatcatttggattcgatctctttttttgtataaaataaaggcgaaaagaccagccttttcgcctatcttatatattatatattttaaaccttcaaaattattgccagaaagatggtgttaattatgaaagcccttcataagaatattctagaacgtcttgatcaaattatcaataatactggggatcatattcacgattttattaataatcctcatgcttttaccaggaaacgcactttagatgcagcgacagtccttaaaactacaattaacatgcaaggtcagaatttaaacagtgaactctttagagcttttggcgaagatgcaactaaaaagaacgataaagtagttagtacttctgcctatgttcaacgcaaaagccagctttctcctgcttgttttaaacatattctgactgtttttaatcaaaatctatttaatattcaactttttgatcatcactaccgtttgtttgccattgatggctctgactttaatcaaatctggaatccgaaatcgaataacattgtacaagcttcttctcataaaaagaaaccctattgtcaaattcacgttaatgccttatatgatctattgaataatacctaccaggattgtatttttcagcctaaatcagaaatggatgaacgcaaagcggctgttcaaatgcttaaagctttgaattgtggtccatatattgtaacaatggatcgtggctacactagtttcaatatgattgaaaactgcaatcgcctgcctaactgtcattacataatacgaactaaggctggacaaggcggagttaaagaaataacgacattgcctgatcaagaatgtgatcgtgagatttcctgcctggtaactacttctaactattactacatcacgcataaagccagtgagaatattcaccatgtccagcatcattatcgccaatatattaagtatcgctctaaaaatacccaggatctaagctgggattttggcgagttatgcacaataaaatttcgagcctgcaaatttagaattaatgatgccaaatcaggcaaagaagaatgggaagttgtgctaaccaatcttgatcgaaaaaattatccgctaaaaagaattaaagagctttatcatctgcgttggggtattgagacctccttcaagaaattgaagtattctttaggcagtgtacagttccattccaaacaagataaatttattgaaatggaaatttatgcccatatgattatgtttaatgcaatcagtcaaattgatgcacaggcctatattccgcaaaagcattgcaagtatcaatatgccatcaatttcaagcaatcatgcttgattattcagagcatgtatttggcttcttctttaacgcaagattttgaacggatccttattcagatcagctattataccattccaattagaccaggccgcaaggacaagagaaatattaagcccaaatcagctgtatattatttatatcgcgtagcttaaaaaagcagaatctgtgctatgccttatttgttgtacgaaaaaagcaccaatttaaccaattaaatgttaaatcagtgctttaaaagtctaatattaattgtcaatgtcttaacttaatgacattggaaatgttctaactgacttttttgtttcatgtgaaactaattatttttcttcataccattcggtgtggaagacgccttcacgatcatttctaaggtaagtgtgcgcaccgaagtagtcacgttggccttggatcatattagctggcaagtttggattaaagattgattccaaccagttaagagctgcgctcaaagttggagttggcacaccacacttagtagcaaattcaactgacttacgcaaagctggcaagttttccttcatcaaaccgcggaaataatcgtcttggaataggttcattagcttgccgttcttgtcataggctttttcaatatccttaagcattgcggaacgaatgatacaacctgcttcccaatcttgagcaattgacttgtatcttaagtcccaatcataagcttcagcagccattgtcaattgttggaaaccttgagcataggcaacagcttgggctaattgcaatgatttttcgaatacgtcaaccatatcatcaggaatttcaccattgtattcaaacttagttggtttaacgcccttttcaattgtcaagtgtgcttgcttactcatgaaacgtgccattacagcctcggctaccaccgttacaggagcgccaagtgcaacaccatcttcgagcatccagttaccagtacctttgtatgaagcaacgttcaaaatgtgatcgattacgtgatctggcgttaaatcatctttttgtgccaaaacctttgaagtgatttcgctaagatatgcttctaccttaccatgattccatttatcaaaaatttctgacatttcatcatcgctcttgtgagcaacgtcacggagtaagttgtaaacttctgaaaattcctgcataataccgtattcgataccattgtgcaccattttgacatagtgaccagcaccttcaggtcccatgtagtagacacatggcttgccttcagtattcttagcggcaatagcttcaagaattggagcaacttccttataggctggttcatcaccacctggcatcaaagctggaccattcaaggcaccctcttcaccaccggaaacacccataccaataaaatgaatgccgtgcttttccatttcgtggaaacgacggttagtatcgtgataatttgagttaccaccatcgattaaaatatcgcctttatccaaaagcggcagcaatttttgcaaagtttggtccactggatcgcctgccataatttgaatcaaaatcttgcgtggcttttcaagtgagtttacgaactcttcccaggtgtagcaaggctttaatttatcatcttcatattttgcgaaagcatcaacttctggtttgtcgattgagaaaccggaaacggagaagccgtggtttctaacattcaaagcaaggttcttgcccataacagacaaaccgataacgccgaattgttgcatgtttattaattcctccattaatcaaagttcatcaagtattattatacgttctagcacgcaaaaaagcgaaaccaaaaggttccgctttttaaaatctagttaataatttttttgttattgggtaaaggtgtttcacacactgctcggtaatatttcctaggaaatattacttttattgatcaataccccaaagtaaaatgttaaatgctaatggtaatgttagcttggtaatgtatccatcctttttagcctgttttaaagatgctagaacaaatttacgttgttgacccgttagctttttggctactttaacagctaaattaaagtcatactcgttttttctaatagcatttttgataactatctttgcccacagaaataggttgagaatcggagtttacagttacaatgtagctccacttgctaagtcgaggaatatttttaattgttatagctttatcaaacttagctactgcagttgaattgctgttgtctgcagcgttggcagtgacagacgatgctgaaaataatgctgcaagtaaagcagtagcaagtaaactaattagagcttttttagatttcataatttagcatctttttacacatagtgcttattggctaataagcattaattcatatccaacactgtctattataagcatctgtattctatttactagccaacaaactattttatatttaaaatcgtatataaaatgaggctatttcccaggaaatattttcccatacaaaaaaagcgggacaaacgtctcgcttctttataattactcaaccaaattagtgttgtgaagcacctgaaaccgtatcaggagcaggatcctcttctggttctgattcttcatgttgagatgcacctgttgcagcgtcagcttctaagccgtacttttctgcaaagtaactgaatggcttcaagtcttcagcttgatacttcttgacaaaggctgggtcgtcaagtgagttcaactcagttgagtaaggcatttcgtgagtgtacttgacgtcgatcaacattggaccgtccatcttcttgaattcgtcgacagcatcttcgaattccttcttggtgcgaaccgttacacccttaacattcataccttcagcaacctttgcccagtcgttatcagggataataacaccagataatggttggtgagattcatcttcttgttctgcttgaatgtaacctagtgtttcgttagtaaatacaatattcaaaacatgcatgttgtaacgagccatagtaagaagttcttggttcatcatagcaaaaccaccgtcaccagctaattgccatacttcacggtctgggtaaacagttgctgcagtaagagcagctggagcaccataacccatagttgcgtgcaagcctgaagtagtccacttttgatcatcatgcaagttcaaaagacggcatgagtcaacgttaacgttaccaacatcaatagcaaagatggcgttgtcatcagccttcttgttgataacatcccagattggttcaggacgtacaggcatttcatctgagttcttaaagcttgcttgccatgcatcccagttctcacggtctgcaatagcagccttgtaaagtggtgattcgctacgttcttcaccagcgtcaataattgctctcaaagccttcttagcatctgcaagcattgaaacatcagttgagtgacgcttaccaaacttagctgaatcaacatcaatttggataaccttagcgttcttagggaaccataaaactgagaatggtgagttgttacctacccaaacaactaagtcagttgcgctttggacttcttgagcagccttaggtccgatacggccgatagtacccatgtatgctgggaatttgtcttctactacacccttgcctaagtatgatgacataataggggtcttgaacttttcagcaaattccttaacttcttcaccagcatcctttgcacctaaaccaatgtacatggttgggttcttagcttctttcaaaagcttaacagcttcttcaactgaagccttagttggtgctggataattgtctgctggatgagcatccttgtttacacggaaggtgtcatcaatcttttgccaaccgtagtccttaggaataatgataactgcaggaccctttcttgcgtaggcttgacggatagcttcatcagttaaaattggaatttgttcagcggtcttagcttggcggcaccaaacactagcgttcaagaaccacttgtcttcatcaaaagcttggaagaagtcaatatcttgacggctagttggaacgttagcaacaattgctaccattggagtcttgtcaaacttagcatcatacaaaccattgaataagtgggcagcaccaggaccagctgaaccgaaacatacacccaacttaccagttaacttatattctgcagaagcagctaaagcaccagcttcttcgtgacgtacttcaataaatttcatcttatctctaaagtcatagatagcgttcatacttgagtcgaatgaaccacctgggaaaccgtagatatgatcaattccccaatcgtaaataactttaagcattgcatcagaaccattaatttttgtcatataagtgcatctccttaacttttgttctttcataatgtattaaaacactttttttcacatttgcaaaccgataaaatcaccgttattacgcaaatgaaaacgcttttgtaataataatcacttcacaagctttaccaaattcaatatctcaaaaagctgaatggtagcgttttatattgtgatttgatgaacattattatactaaatttcacttattttatgtatattcattgttacttatagtaaaaatttaagaaaaaattttttacaatttatttcatagctatccaatttagaaaaacgttattttataattttgcgcataaaaataacgtagaatactattcctacgctatttttgtgctattctactttttcactctagagtaacgcccattttgaatgtaaacactcaagattgccaagtcagctgggttaactcctgaaattcgttctgcttgagctaaagtttcaggacgaattttttcaaatttttgccgtgcctcagtagctaaaccttcgatttggtcataatcaatatctgctgggatttttttggcttcttgtctctttaagcgagcaattctggtttcttctttcttgatatagccagcatacttgataccaatctcaacttgttctttaacgtaacgatcgcctggaactttttcaccagttaaccgttcaatatcagcaatagtaacattagggcgacgcaagaaaacatcggccttaacaccggccttcattggttcctgaccaatactttgcaaaaattcctgcacctcatcagttaaatgaaccgtaatttcatgcagtctcgtctttgcatcttcaatcgcatgcttcttttcttcaaatcgtgcgaagcgttcgtcagaaattaagcccagatcatgaccatattcagtcaaacgcaagtctgcgttatcattgcgtaaaatcaaacgatattctgctctactagtaagtagacgatatggttcattcgtccctttggttaccaagtcatcgattaacacgccaatgtaagcatcgttacggcctaaggtaaatcctggcttatcttgagcagataatgccgcattaattcctgcaattaaaccttgaccagctgcttcttcataacctgatgttccattcatctggcctgcagtaaataaatgctttacgtttttggtttccaaagtatgcttcaattgccatggttcaaccacatcgtattcaattgcatatcctggtcgcatcatttccgcatgttctaatcccgcaacagaatgaatcatctttaattgaatttcttctggcattgaagttgaaaagtcgcctacataaacttccttggtagtctttccttctggttcaaggaaaatttggtggcgatccttatctgcaaagcggacaactttgtcttcaattgaaggacaataacgtgggcctacacccttgataattccagagaacatcggtgcacggtcaagattgtttctaataatcgtgtgtgtggttggattagtataagtcatccaacaagaaatttgtttttgtaaataatcttcatcacgactttcatatgaaaagtgccgtgggattttatcaccaggttcttcctcagttttagaatagtcaattgtattgccgttaacacgtggaggagtaccggttttaaaacgacgcagcttaaaacctaacttttctagattttccgacagcttaattgaaggagtagtgttatttggacctgaagaataagtcaattccccaataataattttaccgcgagccgctgtacctgtagtcaaaacaacgcttttagcatgatacttcgcaccagtattggtaatcacacctttgcagacgccatcttcaactaccaattcatccacgatagcctgacgcaaggtcaagttgggcgtattttcgatcgtatccttcatgtgttcatgatattgccacttatcagcttgagcacgtagcgcacgcacagctggccccttacccgtatttaacatccgcatttggatataggtagcatcaatgttctttcccatttgaccacctaaagcatcaatctcacggacaactgtccctttagctggtccaccaacagatggattacatggcataaaggccaccatatccaaaccaatcgtaaccagcaaagttttttgtcccatgtgggcacttgccaacgcagcttcacatccagcatgcccagcaccgacaacgattacatcatattcatttgaatcatatgttttaaccattttcatcctactttcctaaacagaattgactaaataattgcgtgattaattcatctggggcactttcaccagtgatttcacctaaagtatcccaagcaccagtaaaatcaatttgtgcaatatcaacagggacgccatcttcaactgcttgaattacatcttccaattctttcttagccttatgcaataaggaagcttggcgttgattggttaccataatttgatcattagaattttcaatcccagcaaaaaatagcttattaatcaattcttcaagcgcatctaagttttgttctttcaaaatcgaagttgaaataacatcactacccgttagtttctccatctcagtagttgttattttttgacctaaatccgacttatttaagatcacgattcgcttcttgtcctttgttgcttcaattaaggcttgatcttcagctgttaatgcttgactagcatcgattaacaacaagaccagatctgctcgctccaaggccttttttgatctttctacaccaattttttccaccttatcttcagtgtggtggattccagcagtatcaattagctctagcggtactccttttacagacacatattcttctaacgtatcacgcgttgttccagccacatcggtcacaatcgctttgtcgctttgagtcagataattcaataaagaagactttcccacattaggacgaccaacaattgcagtagccaaaccattgcgcaagatttttccttcttgtgctgtcttcaataagcgattaattttatcaattactgatctagatgtgtctgccatctgttttgcggtaacagtatctgcatcatactctggataatcgatattaacctcaacgttagccaaagtattcagaatttcctgccgcattgcctgaatcttgtgtaacaatccaccagctaattgaccaacagccacttgtcgtgccttatccgtcttggcccgaacgatatccatcacactctcagcttgagttaagtcaattcgtccgttcacaaaagcacgtttagtaaattcaccaggatcagccattcgcgcaccgtgactcagcaacaattgtaaaatatgattagttaccacgattccgccatggcaattgatttctacaatatcttcacgtgtaaaggtcttgggcgcacgcagcactgtcaccattgcttcatcaatcgttttcccagtatccggatcgataatatgaccatagtgaatagtatgtgtcggcaccttgcttagatcttcgcctttaaaaacctcatcagcaatcttaattgcatcctcaccagacattcttacgattgaaattccgccttcaccgatgggggttgaaattgctgcaatagtatcgaactctgtcaaagtttgagccataattcttcccttttctcaataaaaaaagcgcattataccaccacgaataaccatgatggataaagcactttgactactttatctaaaaatcattttagactaatattcttttatttctttttgcgtcctaaacgcttgtaagcccttcttagtttacgtttgcgttcacgctcagcctcagcctttgcttcttgctctcttctatatttaatagggttttgcaagataaaggtttgaagcgcctggaacaagttggaaattacccagtaaagtgtaatagctgactggaagtttaaggccatcacaccaaccatgatagacattccgtacatcattactttggtcattccattttgcgatgattttggcgtcgataattgactaatatacgtcgataagaacgtaaagatcattgctaaaataggcatgatgtaatatggatcgggcttgcttaaatccatccataagaagcgcccagtttgtaactgcggtgtacgtaaaatcgcaccatacagtgcatacataactggcaactggatcaggacaggcaaacatccagtataaggatttacgcctgcttctttataaagcttgttagtttcttgttgtaataatgttcttgattcagtgtcacgtcctggatatttcttacgcaactcattaatttgtggttgaatgctttgcatcttagtagtacttcgaattgaaatagcattcaaaggtactaagatgacacgaacaatgacggtgaagacaataattgcccagccataactgttccccattaacttagctagccccaaaataaaagctgacatgtaataaacgatccaacggtcccaccaattaccacttgtatgtgagattggcgttgcttgaccatttgctcccgtagtagcacatcctgtcaatacaacagcaagtattgctactgctaagactgcaagaagacgtttgacatttctcttggtcagaatgtccttcaatctatttttcctcaactttatctggcatttcttcaataatatgagctaacgataatgcgtgaagcaagtttttacgcacctgagccatattaaaatcgcgagcataaggtcgcgtaatgattaaaaaatcaacatgcggattaatctgcaatttttcttcatcaatcacggcccgaatataacgcttgagtcgattacgtgcgactgcggtatgaccaacctttttgcccacagaaattcctactcgaaagtgtttattttctgttttttctaccttataaatgacaaaagctcggttagcgactgagtcgccagattcgaaaacttgctggaaatctttttcagattttactcgataagactttctcaaaacgtttcattccactctagtagactaaaaaaaccactgggattcagtggtttaagcagataagacttttctaccttttgcacggcgtcttgctaaaaccttacggccatttgatgtgctcatacgcttcataaaaccgtgaacacgtgaacggtgacgcttcttaggttggtaagttctcttagttgtcatattaaactgcacctccataaatttttgtgccaattgcacaatgtcttattaaggatagcacgaaaagccataaaaaccaagtattttaagaaaaaaagacttttaaatcccgtgaatattttctaaaaattcattgtttttcatgtggataaaaaataaaatatttttcttacgtataatttccacaagataattcccaacgttttccacaactcacatggtgttaaaaacttaattcacaccatgtggataacgcatatggtattttacctcaagtattgatagaatagtatccataattcacagctgtactgtgcataaattaacggttttgctcttatcatgtcaaaatgtgcatatcgctttaatagttgtcaacaggctgtgtgctttgttgatttctttttcacctgtggaaaaccagttaagtaaatggtaaaataaatttgctttttactaactgggggaatgtaca

SEQ ID NO: 10 - DNA, 191740 bp, Lactobacillus crispatus
  source 1..191740: mol_type = other DNA
atggaaccattgaaaaaatcaaataatgttaacgctagtcatggtacgggtacccctgttgtaaataaacctggtcaagtaaatagaccaagctttaaaactaataaagcaaagaagcaagtattcggatcaccaaaaaagccaaagaaaaataataaaaagaagaataaaggaggtatgccactacctctaaaaattggaggtggagtagctgcaggtgcacttgctgttggtattattggttacgcaatgaccaataaccacgctaataattcagcgtctaataaagataattcaactgattcagatttaactggaaaagggtcagatgatggaaccaatgatttaactaaaaataagaagaaaaattcaaataataaaaaatctaagaagtcaaaaaaagatgggaaagaaacagatttactaaacgatattttggacggtgaaggtgctaaagcatctgggaaacattcatcaagtaaatctagctcttcagaggaattagattctcttattaagtcaatgggttcagatagtaaaggttctcataaaggtggagctagtttaaaacagttagctaaaaaagctaccgaaagtaaggctgtagctgaaaatttaggaggaagtaaatcatccaaaatttccgaaaaggaaaagtcaagaaatgaaattggaactgagaaaaagaatacttcagaattacaacaattagccaacaaaaataagaacgcaaaatcagtaagtagcgagcctaaaatccctggtcaatccaacatcactaaaggcactactactaatagtaaaaacactacacatcataatatatctactggaacaaagggacagccgacgacagcaccaggtcacggtcaccacggcggtggtactcaaccaactggtcagccaacaacagcaccaggtcacggtcaccatggcggtggtactcaaccaactagtcagccgactacagtgccagatcacggtcaccacggcggtggtactcaaccaactagccaaccaacaacagtgccagatcacggtcaccacagcggtggcacccaaccaactagtcagccaacaacagtgccagatcacggtcaccatggtggtggcactcaaccaactagtcagccaacaacagcaccagattacggtcaccatggtggcgaaactcaaccaactagtcagccgacgacagcgccagatcacggtcaccacggcggtggtactcaaccaactagtcagccaacaacagcaccaggtcacggtcaccatggcggtggtactcagccgactacagtgccagatcacggtcaccacggcggtggtactcaaccaactagccaaccaacaacagtgccagatcacggtcaccacagcggtggcacccaaccaactagtcagccaactacagtgccagatcacggtcaccatggtggtggcactcaaccaactagtcagccaacaacagcaccagattacggtcaccatggtggcgaaactcaaccaactagtcagccgacgacagcgccagatcacggtcaccacggcggtggtactcaaccaactagtcagccgacgacagcgccagatcacggtcaccatggcggtggtactcaatcaacaactgctcctactccaacattaccatatgaaaatgtacccgatggaactactaaaactgttcaatttgtggacagcgatggtaaggttgtaggaactggagaattaactaaacacggaaatggagtttccctaaatgacattccaagcggttataaattagctgatgaagatgcaaatgggaagtcagctcagctacttcaatggccaaatcaaattagtgtagtatcagatggcagtcaaccaacaacaaaatatccgtctgatagtgtacctgatggaactactaagtctattcaatttgtagacagcaatggcaaggttgtgggtactggagaattaactaaacacggaaacggtgtctccttgaatggcattccaagcggttataaattgtctgatgaagatgcaaatggaaagtcagctcagctacttcaatggcaaaatcaaattaaagttgtttcagatggtagtcaaccggcaacaccaacttatctgtttgaaaaagtagcagatggttcaagtaagcctgttacttttgtagatagtcaaggtaaaagtgtaggtactggtacaattactaaagagaaaaatagtgtaaacattaatgatattccagacggttataaattagcggatttggattctaatggacaatccccacaactattgcaatggccagatcaaattagcgtagtgtcggatggcagtcaatcgagccaaccgacaacaccaacttatccgtttgagaaagtagcagatggctcaagtaagtccgttacttttgtagatagtcaaggtaaaaatgtaggtactggtagtattactcgaaatggtaatggcgtaaatgttagtggtattccaggtggttataaattagcagatgaagatagccaaggacaatccgcacagttgcttcaatggccaaatcaaattagcgtagtgtcggatggtagtaaatcagctactccaagttacccagctcaaagtattacaaatggtactagtaaatctgttaagtttattgacgatagtggcaaagtagttggtacaggtacaatttctaaaaacggtgacagcatcaatgtagatggtattccaggtggttacgaattgtcagatgaaggtagccaaggacaatctgcacagttgcttcaatggccggatcaattatctgttgttgctacaggtggagcaccttcaacaaatcagtctaccggtaattctgaaggtcagcttatcaatggtgatgcttctaagacttatccatttgaaaaggtagcaaatggaacaacaaaagatgttagttttgtagatagcaatggtaaggttgtaggaaccggtaaattatataaaagtaataattctgtgagcatagatggtattccaggtggctacaagttatctgacgaggatagtcaaggacaatccgcacaattattagattggcctaacaaaatagtagtggttgctgacggcagctcaaagccaactactacttatgcagcagaaaacattccagatggtacaagcaaatctgtgaaatatgttgacatgaatggcaatgtactaggtacaggtacaattacaaagcatggcaatggagttagcgctgatggtattccttatggttataaggttgctggtgcagaaggaaatcaaatgaatgacttattaaactggagtgatcaaattactcttatgccagcaaattcagcaatagcttaattcttgcaattagatgaatgtaaaagggcactaaaaaaagtgcctttttatttacgagaggtgctaaagatgacaacagtgattttagcggagaaaaaagatcaaggtcgtaagtatatgacttaccttggtatcaagcatagctctactgcttcaatggctagtgggagtacatttttagatccgaataccatagtagtgagtgcttcgggacatttaattaagttacaggaacctgagtattatgattcaacttatgaggatcgggataatatgagtattcttcctttgataccacctaaatttgcatacgaagtatcgcctgaaactaagttcttattttatcaagctaaaaaggagttaaaaaaaagcagatacaattattattgctacagataatgattatgaaggtggagctattgcttttaatattttatggttgtcaggaattcttagtttaaataagcatattctaaggtcttatccgacagctatggaaaagaaagcaattattaggcaattccagaaagaacgtttaaagccaattgatgagacttggaggcaagctagtgctgcgattgctagatctagaagtgattggctaattgggatgaatttaagtagactttatactcatgaactatatcaattgggtattccgggcaattttgcagtaggcagagttattacagctaccttaagcttgatttgtagttggtatgagcaaattaataaatttcatgaagatcctatttatgaaatggaaggaacaataaaaaactctaatgacccaataacattaaaatcaaaagttagaattgtaggagatggaaaaagagatgcaaaacaagaatatttaagattacttaaacaacataaacttttgcaaaaacaaatgataggaaaagtatcgcaggtggaaagtcaaactaagaaaaccatgcctccaattttaatgacaaaaggagatttatataaagagatgaaagaggcatgtggctggacgcaaaaaaagacagaagatactatgcagattaattatgaacggggatatcaaacttatccaaggactgattcaggattaattgatgaagaagaatatgattatatggggaatctatttgatcagtatttacatgcagttggattggataatagttttaaaaaatatgatatgccggaatccttgaagaaaaaatatataacaaattctgatggttcaccacaccttgctattattccaacagaaaaggtaatgcctacccctgatgaagagaaaagaattattgagaaatttaaagcacttaagcaaaaagcggaagatgagaaaaaagctgctactaataaaacagataaagaaaaggcagaagaattaataaaaaaatatacttatgttcctttaacaaaagcccagcgagaaatgtataaagtagtagttcaaagaagtttaagcatatttcaaccaccgtatgaatatgtttcaaataaattagttgtagatattaataatattgcattttcagctcaaaataccagtaagataaatgacggctggcgggccatactgcctaagtctaaaaaaaagaagcgagaattaaaaaaaagttttgattatcgtaaagtatttaaagtaggacaagaattagcagttactatgcatacttcacttagtaagacagtaccacctaagcctctgactattacccagattttttataaaggcggattaatggagaaagcttataaatatgttgaaaataaggagtatgctaaaattttacgcaatgttaaggggctggggacctctgctactcgtgatgctgctttaactagcttagaaagtaagaaatatatttctgttgataaaaaagatataattacggttactggcaatggttggttgattaactggttattgaaaggaatgcctgttagttcgccagtattaactgctaagtgggaagaagaatatcaacgaattgcagagggaaaagataatcctaatattttaattgaagcaactgctaaaatgattacagagcaattcaataattttagtgaaaactggcatccagaagaaataaaagctttttatcagaaggttcaaggtaaattcttaaaaaccgtttcattggggaagtgtccccaatgtagtaaaggtgatattgtctttattgcagataaaaagggaaagggtaagtggaatagatatggctgtactaataaagattgtaattttgttatctggtcaaagttcttaaataagaaatttacagagaaagacattgagaagttaatagcaggcaagaaaagtcggttattaaaagatgttaaaggcaaaagtggtaagaagtttgagtgctgggttaaattaggctacgatgaaaagaaaaaatctttaacaccacagatgatatttcctgagaagaaaactaataaatatgctaaagacttttatggaaaatatcatcgaacagattaagaaaagtgctgacaattgtaacatttcattgaaaaagtaagtgttaattgtcagcacttttttaatttgcttttactgtagtcactggtaattcgaattgctctgttttaacaaaataaattaaatttttacggtaattaactagtgatgcagcacttatatgtaatttttttagtaattcagtatcagtataattttgctgaattacggagtagatatagcttcttctaagtgattgaaaagtgagttgcattcctaaataattgcgatcagccataatatgttgctcgatattgaattgggatgcatagggatgaccatctgaagtttcaaaaatataattatttttagaattttgtttgtttttgcaatcttcaagatagcttttgatttctttattattaacctgacttattatagttgaatactttaggctaaggatggatttagtttcatagcctagagcaatgcagataagtaataattttgtttcagtgtgcagtttagttgacttgatcaaaattggtaggtctttcatccaattaatcttataaacatgctgacgtgaaaaatgtctacctttaatatttacgagaggatagtgggttattaaattgtgatcatataggaaagtaaagtatgaacgtatgtaacttaaatatttattgatagttgatttttttaaatttttttgttgctcaagaaaatctaaatactcagctatagtagattgatttatgttgtttaaagtagcttctttaattgaattgacagtgtagtagttccaaaaatgagttactgaattcgctattctagtggctgtatttgatgaaagtctacgttcaccgatcagccaatttctaagagctgtttgataaggaaaactaatcaagatttatcatcctttaggtaaaaatatggttttacaagtaagtggaacaggattaattaaaaaaattggtaaattgcatttaaaagaaaatcgctgttaccttcaggtaatcgtaaagtatgttatcaaattacctgatcaaactgctgagattcggttgattttgagtcaaagtataaatttacagcagaagcttagcaatttaaaattaaatgatttaatttactttaaagggcaaatgagccaggattctactagtttgtttattttttgtagagcatttaaaattgggaaacttcaaaggataaataatttgaaaaattatgaaaatcctgatgtaattgataatgatttgttgagattatccttatttaaagcactaaaaaaactacaaggtacaagtcaataataccttataaatactctcaagcaaagtaagaaaaaagaactgaatattaattattagaataaggggttagaatattgacagcaaataaagacgttaatgatttaatgaaagagttacatctaaaacgtgaggaaataaaaaatgcctttttcaaattgcccaattatattgaagtaatgggagctagaggcggtatgcgaaaagaaattaataccgttattaagcatttttcaactcaaagtttaatttctgatcagttatatactttaattgttaagcaattcaaagcaaagaaaaatttagtttcagtaactgagattgaaaaagatcatcgactaaatgctgcaaaagttaaccaatttatcaaagaattaatggttaataataaatggtttgattttgacgcacagaatatctttaaacacgccaattataaatatgtacaaaatcgtaaggttaaaggatttgttgatcagtttttcgactggatgcttggaaatagtgctaaatttcattatcgtttattaaacaaagaaacagacgaagacgatgacttttttgctcttgaagaaattcaagctggaaattctaaaaaaggcagaatactaggttttgactgtgcaattgatggtaaaattgaagctatttgtggtttttacaatgggacaattaaatttatgccctctttgcaacgctcatgctcaggtttaagatcgccagaatttgatcaatttgatcaatttgatcaatttaagcgtcctgtgtacttctcatttgatcgtgctgaattaatggatagacaattaaggacacagtttaatctgtttgtagcttgtttaagtcttagaccagttagaattcaatatggtggtcaaaaaatgagagtagtaacgactaattttgaatttaaattaagtgatttcgagcctaaggaatttcagtctaaaactaagcaaggattattaagaagacaatttggtaatatcaattcagataatttccaaaagtatttaagtcaacatttatcaataaccagtatttatcagtttctatatgagcatacgcacgaaaaaggatcagatgtaactactgataaagaaggatatatgcaagactatgttagttttaaacgctctaatggttcaactaagaaagatactattgttgttagctctgatacatatccttcttgtttctgggtacccaaaacagtgaaagcgcaactggataaaattggaatttctgctggattaccaccagagtttattttagaattctggttaaagtatcttggtgatttgaaatcaggaattgatgaaaaagatgttgttaaatggctagacaatgagataattcaaactaatcaaacaatcacagcaatgattgatcactggtgtcaattacttggtactaataatcgtcttgaagcaatgcaacaaattgatggcataattaaaggacgtagaaagcccaaggaagatattagtgatgatgatattgaagatgatgactttgatgacggattaggagagtaaagttagtagaaaggctactagctttttcttttgacaaaaagtggacaaaaagtggacattgatataccatgatggtgaggagaaaaataatgtcgaagattgatagatttgaagtagcagacagattaggtgttactacgcgaactttaagaagatggaacaatcaaggaagattagtgccatttagggatgcaactaatcatccgtattacacgacagatcaaattgaaaacttcttaatgaaaggacataagattaagcataggataatttggacatctaaacatttgaataaaactaaattagtgactttactgtccaaatattctaaagaatatttggtgttacaaagctccaatatatctttgggtgaagatattcaattatctagaataattacatatgcgttaaattatcaattgggagagttaattatttgtaaagatcagttaattaatcagcaagcatttgaggtcttacggacatttttaagaagatttaacgttaaagttacaagtattgattaagaattttaaggagaaaaaacatgactaatgaaaaaattgactggagtaaaaaagaattagtaatagaaaataatcgtatgcttagtagatggggattaaggctagcatatatggttcaaatgcaagatcgtatttttttatcaaatgtcattttatttactggaataagaacaactaaacatcaatttaaaagtgttttgacttatatggtacaaacagagtatcagattaaattaatggagtgtgttctttttagacgtcatgatcttagtttaatgcttttggatgtcgactttaattctttgagctgggctaaaaaacaaacctatgaatggtttaaaacattaccacgtcaattaatgtataatcatggttatgtactggactctaaaacatttaattacattttaggagatgtaggaattaatgcaactaacatagttgatgtgcctaaaataactgatgaagccaaggataaagctagagaatatgctgaatcatggtttaaagagaaatatgatcaagaagcaaaagaaatgaaaaagcatgaggttaatgaggatgatttcgataatttaatggatatgtggtacacagaatttgagtggtatcctgatgacaaattatcttgctttaactggtaaaaaacgattaaattttactttattatttttcaatattaaaaatgttaccttttattctgttaaataaatgaaaggagcaatttatgaaggaaaacaaatattttcttttaactcaaaattatgaagaagttttgtcaaatgccattgatcaatgcttgatgcttttcggtaagagcaatcagacaaatgaaaatattatcattactaatgtgggacaatacttaattgatttggtagataaaggtgacagtgtaaagattcctgcagtgactgataatatttttgtacgttctatgggattagcttttacaattcgtttttacaaggataagcttgcactaattagtttagttaaatttattttgactgtagcagataaggcttttgcagctgaaaataatgatcatgaaatagaaaagattgtgggtcattatgatttggactaaagttatgacacagaaattatttggaggatttaataatcaagataacaactcaactattagatttttagaacaagacaatgctggtacttttagtcttgataaggaagttaatcaaagtccatacaatccatacgttttaaataatatggatttcctaggacttattaaaaatgttctagctgataagcaattacaagttattaaggttatgggtataacttgtagtcaaaaagtagttaagacagccacgcaactaaatagtagtcaaattatagcagcattagctaatattcaatatttaactgcgataatgataaaagaaaaagcaggtgacgaatcagcaataatccagaaaagcggtgttatccagctaagtaaaggaaataaaaaaataaatcgtgatttaactataattttaaatagacgataaagaaacagtttttatgaagtgtttaagataaaaacgacacttttcgaaaactgtttttttcttacgtagagactgttgagttagaactgaacgagactgtaaaatagtttgtgtaaggatgaatgattccttaaatttatttctttaaacattagaaaaaggagttcctttctcgtatgattggtttgaacaaaaaacacatacagaaagaagaactccttcatgaatgattttaccaaagattttgctcaagctctattcaatccagacaaaataaatgatttattgcgcaaagagctacaacaggctgttaataacttgctagaagctgagttgactgcctttctaggctatgatccctatgccagaaatggctggaatactggcaattctagaaatggtgcttatttccgcaaggttgatacccagtttggaccaattgaagtgcaagtgcctcgagaccgcaacggtcagtttcatcagcacacgctgcctgactacaagcagcactctgatgttttggaaagcacgattatcaagctctactccaaaggcgtaactaccagagaaatcgctgacttgattgagaaaatgtatggcagtcattatagtccagctcaagtatcaaatatttccaagcagatgctccccaaggttgaggcttatcacaagcgcaagctaagcgacaagtttttctgtgtctatttggatgcgacataccttcctttgcgccgagaaacgtttgagcgtgaagcagtatatattgccattggcattaaacctaatggacataaggaagtcattgactactgcattgctcctagtgagaacattgaagtctggacagagatgcttcaaaacatgaagtccagaggcttgaagcaagttgaactctttctttctgatggtgttgttggcatgaaaacagccttggccaggacttatcctaaagctcattttcaacgctgcctggttcatgtcatgcgcaatatctgtgctaaagtccgggtggatgaccgcgaaaagatcatgaacgaattcaagcagatacatcaacagacaagccaaaaagaagctgcagctgtcttgcacaaattctatgccagatggaataaagtttatagccatgtcatcaaaggtttgaaggaaattgagcccgatctgctggtcttctacaattatcccaaacaaatcagagcttcaatttattcaaccaatatgattgaatcctttaacaacgtcatcaagcgtaaagctaagcctaaggcagaatttccaactgaacagtcgcttgatgcatttattggcatccaggcaatgagctacaatgaccgctatttcaaccgaattcataaaggctttggtcaggttcaggataccttagaatcttattttgaataaataattaaaaaatcaatttacgagaaagaactatttacacaaaagatttgacaggttcaactgaactcttgataatatcttagtatcaatttttatagaatattggagtaatatttatgaaatataattttgaacaaactcaattatcatcagttgaaaagaaagctattcttaaatttataaactttcataatatgattgttcctaaaagactagctttatgccttcttactgtcgacgagaagttttggaataagtcagatgctattttagcttatttggaagataactacattagtggtgattcatggcctgaaatttggcaaaatatttgtaagagtatatggcttgagattaatgcaattaaggaattaggtgaatatgtttcttcagaagagaaatttgatgaacaaatatgtatgattaaaaaggcaaatcaatttattactaatcagatttccaaagaaattgttaagtaaaaaaagccagcactttattttaagtgttggctttttctacagttagttattattatcttaatgagcctgcaaatgatggaggaaatgctgaaatacttccgactgagacattttggccataatccggtgctgctacgaatttatcaccaccaatgtagattgctacatgataagaatgaccaggttgtccccaaaatagtaaatctccaggttgtgcttgagaaacaggcttttcatttacacatgattctagctgaattgtgttgtgtggtaacgcaatacctaattgagcgtaaacataatcaaccataccggagcaatccattccggcggtggaattaccaccccagacatatggaatattttcttgagtaagttgtagagctaaattaacggcacgagatgatacggtatttcctgatactgcattttgcccttgatgaacggtagatttacttacactagaagtagagttagtgctaattagctttaatttttgaccaattaaaattgttgaatgccagtttaaatgattgagctttaaaacatcgttagttttaagtccgtattttttggcaattgtagaaacagtatctccttgcttaactacataagttttaggaatatcaggaatattaatattttgattaggtgtaagagatgaattggtatttaaattgttggctttagctagttcctcagctgtcatatgatgatcttgtgcaattgattgaattgtgtctcctgacttaacttgcacagtatcagcatgtgctacagcagtacctaaagtagctgaagctgaaccacctgctaagaaagcagaagctaatttaaatacagtagttaatttattagtaattattttaactcattcctttcaaatctgttggacgaggttttttgataatttgcaatatgttttaaaagagtagataacgtgtgcatccctgtattgtttttcttccaaagtaatttgcattttgggccaattattctttttatcttgtggcagcagtttgaaaatcatccaaagagtagctttgtaattactacgataagaaacttgtttatcttcaaagacatcaaaatacaaagatttagtctttattgcatctatgatgttggggcttgctactttacgattgtttaaacaaatttctttagtagcgatcaatagtgcaaaaggaaaattgtatttatctgtatgtcttagaaaaataaaatccttacctttagttaaacagtaagacataagcttctttgaaaagtagataccagtataaaaagatagagttctttgtaaattttatttgttaatcaaaagattattgtaattaaaagtcttagttaaacatgggataaaagaaacattgtttgcacgtagcaggcaatgcttttttgtgtcttcattgacttctaatgaatgatttgatgtaaaagctaaatgcttggcgtaaagcgctatgccttgtctagcattataacttggtttaacaagagccgtaattggatttttgcaataagggcaaaatgcgatatatctacttgataaatacgttggagcaaggtaccgttgaacgttatgtagatttaaataatgccaatgcttatctgttagattagttaagaaaatcttcattgaaatagtgcagccccttcctatcaacgtatctgattccattatgtacgtatggggtcagagcaaggtaaaagtaaaagtttacgtttttttgaaaattaggtcaacttacgcaatacgactcacggtcagcaaatacttaaacttattaatagaaattcaaaagatcagaaagaggaaaaaaatgagcgcaaatacaaccaaatattcaagtattagtatggcattagttgatgattttattgattattccaagcaattgaaaaacagcttcaagggggcttttaatcctttagtatcaatttattcaatgattacagaacttgatactaccaagcaattaagcaatgagttgttgcttgatgtaaagaagaaactacaagtactaccaactttttatcatgttcaagttactagattatttattactaggtttgtaaaagaactagaaccggatattcaagaaactgagctaaatagagactgtgttgacttagaagatatgttaatggctgcctgttcagatttcgaaggctgggagcaaaaaattccttctatattagaggtactttacttagctcttagaagtggaattgataataagcaagatactgctttgcgtagtcgtgttaatttacttgtaagtgatagaaacgttcaagcacgtgttttatatgatttttgtaataaatatcaagataagtatgatactcgattaaagcagggggtatttccaagtgctagataaacgaaaactaaagtgtgtgttgactcttattattgcatttggttgtttattaattttaaacggttgctctatggttaagccatcattaagcaataagcagttaactagtgaatttagtgaagttactcaaagcttactaatatcaaggggtactgtagctaaacaggttatcggcaagaagcctaaacagggcgatgttaagatttcatctgccaatgctaaagtcttagctcaacaaaaggataaagtaagtcaaagtcttaagaaggtatcagcttctgcaggattagtagcgcaatatcctaaagcacttaaaaaatatgataattctgttttaggttatataactttgttgcagcacggcacaaccattagagaagctaggtctgaatttcataaagtagtagtagctggtcaacgaattaatattcagtatcagaacatgaaacagaaccgttatcttaatattgctactttcgcagatcaaacctctggatataaagcagatagtccattgtcaatcacaccaactaataagaagagtaagaaaaaagataatactcctgtcaataagcccaaagctcgaaatacattgaaagatggtaccaaagttaaaaccgttcatggtgcatttagattaagcattggttggggtatctactttattgtattggtaataataattattacatcaatctttttacaacctaatagaagtaatgattcaatgaatgccttaactgaatcaggtggtgctacattgtttaatcgtccacgcccacgtggatatgaattatttctactaagaactaccgaaattagtgtattagttttggccgcatcattacttatttataacaggataggataaagatatatgaactatttacaaaaagcttttaaggttttgaagaaatgtaattgggctacatggcttagctccattaaagttacttcagcaattctgactgttatggcagtaagcggagtagcttattgggggctagatattctttttcaaaagttgcttattaaatagaaaggaatgttttgatgaagctgagaaacttaattgaaaacaatcaatttaaacgaaaaaaattggaaaagattgttaagcgagttgaaagttatcaaaagtattatgcatcccttagtgatgataaattaaaagatagtacgatattatttaaaaaaagactacaaaaaggcgagaccttaaatgatattctcccagaagcatttgcagcaattagagaagcagataagcgagtcctgggcttattcccctatccagtgcagattatgggtggaattgtcttaaatgccggcaacttagccgagatgaaaaccggtgaaggtaaaactttaacagaaactatgccagtatatctaaatgctcttgagggcaagggtgtgcatgtaatcacggttaatgaatatctttcagaacgtgattatgaagaaatggggcctgtttttaaatggatgaatttaaccgtaggcttaaatagtagcaagatctttccaagtgagaagaaaaaagcttatgcctgtgatattacatattcaactaatactgaattaggctttgattacctccgtgataatatggtcatatctgtagaccaacaagtacagcgtggcttaaattatgcaattgtagacgaagcggattccattttaattgatgaagctagaatgccgttaattattgctgggaaagataaatctcaaaggaacttatataaacgtgcagatgaattcgctaaatcactagatgaagatgattatgattatgacaaagaaactaaaactgtagccttaacccctagtggagcagataaagctaacacttggtttggattaaagaatatttttggttctgaatcattcacagaagctcactttgtagatgaagctttgaaagccaattatagtatgaagcgtgatcaagactatgttgtacaaccaactaaggatgggcacagtaaagaagtagatattgttgaccaaaacactggccgtgttatggctggtagacgctactccgatggcttgcaccaagcaattgaagctaaagaaaacgttccaattaaagatgcagataaaacagaagcagatacgacttatcaaaattacttcagaatgtattcccaattatcaggtatgaccggtacggcagctagtgatgcacaagaattttatgatacatatcatatgcaggtaatcagtatcccaacaaacaagcctgttcagcgtcaagatttgcccgacattgtatttgctacaaaaagagctaagcttaaagctgttttagataagattattgatgttcattctactgaacgtcccattttagtaggtaccatttcagtagaaagctctgaagaaatttctgaaatgttagatgaaagagatattcctcatgaagtattaaacgctaaaaacaatgggcgtgaagctgaaataatcgcacaagcaggccagcaaggtgcaattacaattgctactaatatggctggtcgtggtacggatattaaattaggacctcacgtcagagaactaggaggattgttcgtattaggtacggaacatcatgaatcacaacgaattgataatcagttgcgtggacgctctggtcgtcaaggtgatcctggtacttcacaattttacgtaagcttggaagatgatcttttgatcagatatggtactgaaagggtacagaaagtaaagcaacagctaatcgaccgtggggatgaatatgaacctattgaaagcttaattgttagacgaggtattgttgaagctcagaagagagtagagggcaacgcctacgatgaacgtaaaaacacggtaagatatgacgatgtaatgaaagacgagcgtgacgctttatatcgagacaggaataaggttcttaactatgatggtgactttgcagattatttgattcctatgtttgcgagaacaattaagttgaaagttgatctttactgtcagggaaataattggaattatgatggcttgtttagattctgcaaaggaactttaggctttgattttggcaagacagctaatcaggatttatatgtcaaagcacttggctatgaactaactgaagagcgaatcgaatcaatgactaaggatgaaattattgaaactcttattaaagtagcacgagaagaatatcaacatcgtattgatgaattagtaaatcctgaagatatttcgttcttccaaaaagtggcaattttacgggcagtagatgtcaattggagagaaaatattgctactatggagcaattccgtcaatcagttactttacgtggctatggtcaatataatcctttagtagaatatcagaactcatcatttgatctttatagtgaaatgctaacaaacattcaggaagacattactcgcaattatatgagagcaagtattgttgattaatcgggaggaaaaatgaataaaattcaagaatttgttaaatcgccgataactaaacgaatcagttttacgataatgattctaattatttaccgtgctttgttctttgtgacaattcctggtgtcaatagtgcggcattagccaagctatcaaataattctagtctgacaatgctttcaatgttcagcggtggtggatttgagaacttctcgattatgagtttaggtgttactgcttacattaccgctcaaattatagttcagttgcttcaagctgatgttattcctacccttactcaatggagtaaagaagggcaaacaggtagaaagaaattggataaggtaacaagatcgttaactctggtcttaggtcttgttcaagctactggtatcacattagggattaatacacttactaatggtaaatttatgattgaaaataatccttttaccattatagttattgcaatgttaatgactgctggtagtttcattgcaatgtggcttggggatttaattacagaaaatggattaggtaatggtatttctgtaattattactgcaggtattttagttcgatttccatctatgattaatgatgtaattgaaggtgttacttttggtactaaagttaactggatcagattttcggagctaatgattggtgcagctattttaattttattaattgtctggtttacaagatcagaattacgcatccctattcaatacgcacgtagagcacagctaactggtaaagacagttatttgcctttaaagattattgttccaggggtaattccaattatttttgccagcacgattatgaccattcctcaaactattttaatgttcttcaatgcaggtcaaaattcttcttggtatcgagtagttcaaacattctttacgttatctactactagtggagtaataatttacgggcttatgattattttctttgaatatctttactcaattgttcaaattgagcctgataaatttgcggataatttagagaagcaagaagcttatattcctaatgtttatccaggtgatcctactaaggaatttattcaaaatatgttgaattacttatcattgccaggttctttattcctgatgtgggtttcaattattccattattggtagcaaattcagtttcatcaagcctacaaattggcttgagtggttcaagtatcttgattattactggtgttttgattgaaattggacgtcaaattaagggactgaaattaaaacgtaaatatggaacatttttaagtacggactttagtttagatgattaaaaaaattaagaaaaccatcagtggaatttgtctagcattaatctttatggtggcagttattgtttgttttgctgctatacgatggaatcgtgaagttaaaagcagtacttatgctgaagcaataaataatccagataagttgacgatactttatcgaccaatttgtcctagatgccataggacattgcctaggctatttttggaacactgcttggatagtaaaggtgagtatcttttaaatgctaataaattgtctaagaagcaattggataatttagagtgtagggtcacaccaacttttaggtacaaaaatgttagctacaacattgatgattatcaaagaatagataagatttggatagatagtcattagtattctattgttaccaaattagggcaaaaaataaaggattggttctagtttaactagaaccaatcaaaaaaagggagaaaaatatgagcgtaacagttgaaattaaccaattaaccaataattcttcaaaattggggatttttattaatgatcgtcctgtatattggacatgtagagctttagtgaagaaagatgatgctattgatcataattctgatcactatatgcgctatgtagtaggtttatctttattatctaatttgattaataagtataccgatttaaatgtacccaaaaatgatgttaatagggatgcatgttagaaaatattaggtcaatgatgtcaaatctattcaactgccatcattttgcctaagaatgcgtttgcttgctgttcaatattcactaaaaaccttttaaagcactccttgttttttagaaaacaagaaactataggacaactttgcatcagcttcaaccttgcagggcaagcgccaactattttcttatttaagcagctgctcaaataagagcagtccacttaactgggcgtaacactacgcccgctatcccgttgacaaagcttgttttcgggaatacttttctgattatctgcatggcaccgttaatatccgcattgatcaaggtgccattgtttgtcttgaacaagcctcgctttattctgcgatttactgggcttttgccttgtctttgacggttcttattgccgttctcccagcaaggcttttcattatccagggcactggtttgactagtgtagctttcattagtcctaatcacgctaatcccagccagattagccttatattgaatcatctcaatcatgactttatggggaataccaataaagttctgattgtttttctttcccatattgctggatctcttccatgacttattgttgccaatgacaattgtatttgcctcacagcttagcgcataattaacgatacgcttagatgctttgtgagcaaactgtctaatcttgtcatttctccatacagtaagtcttttcattgctttggtttcctgataaacaggtttagggccttgcttggtattaataatactttctaattgatggtattgagcctgcagcttcttaagtctggctctttccttgttatagtactgattaaccgacttaagattgcggccattgattaatagtggcatattttcagtgtttgaaacacaggcaaaagcattatctactccaggatcaatgccaatgtatctgccattatccggcagataattaatttccttattaatcttatattgaacaatcaacttatagccgccgtagacaggcttaaaggctacccgttggatcttttttacctgaagagccagttcaacttttatctttaatttaggtatagtcagatagccgtcttttactttggcgttttgattggtcacaaagaaggtatgacgctcctttttccttaagtatttaggcattctaggcttacccgtaaacttgccaggattcttctggtaagctttattggccttaaaccaagcctgccagatcgtattgacctctttaagagtctgttgggctgactgcacataccccagctcatgatagagaatgcattcacgcgctttatatcttttcttaaacatggaatcaagttgctcatagcctttaacatattgcttatgaaaaagtccttgacgcaaatcatacaaggcacggttatatagatcatgagccttgtaactaattttatccaaaatattactagcgggaatgatgtattcactgcaaagatgagtatattgggtagaatttctaggcacatttttagtctttttggtcatagtttcacctcctttaaatagtttcgagcttaatcttttttatgcagagcatcttcgatcagcttgcgctctgttctgcgatgcgaatactcacgcattgaaaagcagtgtagcaggctgataatttcttcaaacaattcctgttcatccgtcttaggattcgcttcatcagaaacaacttcaattttagtattgtagttcttaaataaatactcgaacagttcaaaaccaactctgcttaaacgatcttgatgagtaattaccactctttctacttttccatcaataatcagatcgagcattttaaagaactgtttgcgatccttaaaagaaataccacttgcaatatcttgataggatccattgatttcatagcctttagcaagacagaaatcctgtagctcctgcatttgattggtcaaatctgatttttgtttgtatgtcgaaactcgaccatagattactgtcaatcgtttagaacggccattctttaagaaaaagaccgaatcatcatcaaaaatatattgtcccgttggcagcttcttggcttttaaggtgccattgagacgataccttctcaaagtagagcgactgatttgaagcaattccattacttttccagctttcatagtttcatctccttagtaaatattatatcatatatacccgcaaaactaagagaaagcataaaaaataaggatttatccattcagataaatccttatgaaataattgaattaataatttctaactatataaaaaaacattagatgaaggagaaaaagctttgtttaaacgctttggacatgatggagattttgataaacttatgcagctttgtaaattaactgacgaaatctctgataatatgctaaattaccggtatagtgttgatgggccagaaccactcatagactaaaaatacacagtagtagagtaaaaagagggttaaaagcgctaagaaactaatatttagtgcaaaaatacccctttttttatgcttttacatgagtaaaccatcttaaaagtccataaatacaaggtttattagctgaaaaattggttttattttaagagaaggtcttttgataaaactagttaaatttgattaattccattgttggtatttaaggtgtaatctaacagtgttggctgataggtcaacggatttattcatactctacatactctatatgtaaaattttactatgtttatgagatacttttcttgatgaaggagactgtaaaatattttgtgtaaggatgaataattccttaaatttatttcttaaaacattagaaaaaggagttcctttctcgtatgattggtttgaacaaaaaaacacatacagaaagaagaactccttcatgaatgattttacaaaaaatatagcacaagctctattcaatcaagacaaaataaacgatttattgcgcaaagagctacaacaggctgttaataacttgctagaagctgaattgactgcctttctgggctatgatccctatgccagaaatggctggaatactggcaattctagaaatggtgcttatttccgcaaggttgatacccagtttggaccaattgaagtgcaagtgcctcgagatcgcaacggccagtttcatcagcacacgctgcctgactacaagcagcactcggatatcttggaaagcatgattatcaagctctactccaaaggcgtaactaccagagaaatcgctgacttgattgagaaaatgtatggcagtcattatagtccagctcaagtatcaaatatttccaagcagatgctccccaaggttgaggcttatcacaagcgcaagctaagcgacaagtttttctgtgtctatttggatgcgacataccttcctttgcgccgagaaacgtttgagcgtgaagcagtctatattgccattggcattaaacctaatggacataaggaagtcattgactactgcattgctcctagtgagaacattgaagtctggacagagatgcttcaaaacatgaagtccagaggcttgaagcaagttgaactctttctttctgatggtgttgttggcatgaaaacagccttggccaggacttatcctaaagctcattttcaacgctgcctggttcatgtcatgcgcaatatctgtgctaaagtccgggtggatgaccgcgaaaagatcatgaacgaattcaagcagatacatcaacagacaagccaaaaagaagctgcagctgtcttgcatgaattttatgcaaaatggaataaagcttatagccatgttatcaaaggtttgagggaaattgagcccgatctgctggtcttctacaattatcccaaacaaatcagagcttcaatttattcaaccaacatgattgaatcctttaacaacgtcatcaagcgtaaagctaagcctaaggcagaatttccaactgaacagtcgcttgatgtatttattggcatccaggcaatgagctacaatgaccgctatttcgaccgaattcataaaggctttggtcaggttcaggataccttagaatcctattttgattaaataaatgattaaaaaatcaatttacgagaaagaactatttacacaaaagatttgacagtttctgatgaagagcttatctctttataaatacttaccttatatatttagatctgtgtagttttcaaagaaaaactacatagttatgtatccttagctcagttggtagagcgtctgactgttaatcagaatgtcgtaagttcaagtcttacaggatacgtaaaaattagaaactaaggattgttaaaaaatccttagtttttttggttaatcactgaattcgggaataatgctacactttagttgtagaaataatttttgattatttttattttgattatcatcaatttatggtttaaattgatttgttttcaaagcccaaaaagtagggcatgtcgattgtttattaatgcttttgcatttatacgatgtttattttttattagttgttctaagatattggttttgtgaccaatatctttttttgtgttctaggaggacaaaagatatgtcatggattaaagttgtaagtcttaatgctaagagtggggaagttgttcctgaaatcattgacaacaataaggaaagctttttaaaagctcttggtagtaagcgaattaccgataagtatgttgcaattttcgagtttaaagttggcgacaagaattactccatcgtttacagaaaatcaaatcaagctcctaaaagatcttctaagaaatacaagaatgtatctgctgtttctaaaaatggtcgagttgagcttcaaggtaatttagtaattgctaatacaaatgataagggtcgtgcttgttcgaaactgtcaaatcttttgtgtaaatagatctttctcgtaaattgattttttaattatttatttaatcaaagtaggattctaaggtgtcctgaacctgaccaaagcctttatgaattcggttgaaatagcggtcattgtagctcattgcctggatgccaataaatacatcaagcgactgttcagttggaaattctgccttaggcttagctttacgcttgatgacgttgttaaaggattcaatcatgttggttgaataaattgaagctctgatttgtttgggataattgtagaagaccagcagatcgggctcaatttccctcaaacctttgataacatggctataagctttattccattttgcataaaattcatgcaagacagctgcagcttctttttggcttgtctgttgatgtatctgcttgaattcgttcatgatcttttcgcggtcatccacccggactttagcacagatattgcgcatgacatgaaccaggcagcgttgaaaatgagctttaggataagtcctggtcaaggccgctttcatgccaacaacaccatcagaaagaaagagctcaacttgcttcaagcctctggacttcatgttttgaagcatctctgtccagacttcaatgttctcactaggagcaatgcagtagtcaatgacttccttatgtccattaggtttaatgccaatggcaatatatactgcttcacgctcaaacgtttctcggcgcaaaggaaggtatgtcgcatccaaatagacacagaaaaacttgtcgcttagcttgcgcttgtgataagcctcaaccttggggagcatctgcttggaaatatttgatacttgagctggactataatgactgccatacattttctcaatcaagtcagcgatttctctggtagttacgcctttggagtagagcttgataatcgtgctttccaaaacatcagagtgctgcttgtagtcaggcagcgtgtgctgatgaaactgaccgttgcggtctcgaggcacttgcacttcaattggtccaaactgggtatcaaccttgcggaaataagcaccatttctagaattgccagtattccagccatttctggcatagggatcatagcctagaaaggcagtcaactcagcttctagcaagttattaacagcctgttgtagctctttgcgcaataaatcatttattttgtctggattgaatagagcttgagcaaaatctttggtaaaatcattcatgaaggagttcttctttctgtatgtgtttttttgttcaaaccaatcatacgagaaaggaactcctttttctaatgtttaaagaaataaatttaaggaatcattcatccttacacaaactattttacagtctcgcttgttcactatcggatgcggatattgataatattttggataacaaggttacttatcttgtacctaagccactgagtagttttacttctattcaaattaatatgattgataacgcatttactcgtgcttaccgtaagtatgttggtatgtaaaaaagagagcttttctttggaaaagcttctttttttatacaaattaaaattattatttgcaaaaccagaactaagctttacagtcattaaaataaggagctgaaaggtgaaattatgcgtgaagaatcattagctagctatttaattagcagctcgaaagcattggaaaaatatgtaattcgaccagtagatttaaaggatagtattcctaatatattctggtattgtcctagcttgttggcagttactaatgggaaaaattgggttaattctaggcttgaaaacatgcagtctcccaagctatccgagatagttaattacggtgtaattactctagatgtcacttttgacatccttgaagcgggagacaatcacttgatttatgaagatacttatatgggtattaaagttaaaccaagtaagtatagtactggcagattaattccctttagcaaatttaagaatagggaatacaaaggaattagctttaactttccaagattacttggccattataagtgaaatttggcacataggatttttctccttccgaaaacaaacaacttttaacatcatagttagagaaacaaacaagtctaagatttccaatttaaatcgtatcgccacattaaatagatttttatatggtgaaaaggataaaatcctaatttctgatgaaggcaatatcaacgaaattgacgataatgtaagatttacttctattgcagataactataatatcggtatgcagtcatttacgtggccaagttctccatacaagcaagcaattagatttgatcctatggctggaattgcgtatctttcgagttacggatgtagcaactcaaaaataaaaaatagtttgaatatgatctcaacagattcaggagagttgtctcaaaaatggttaaaaagcaaagaattcatttcctcctataatttaaataaagatttgctatgtgctaatcttagagtttgcaatagtgctttaaaaagtaaatctccaattgttcagtatacttattcaattaacacgacaattaggaatttaagtccttttgaagtcatagcattaaaaaagtatggttattcgattgtaattaacccagagccaccaattgctgatttaactcaaattggattaagtatggaattacctaaaattatttagaatgtcggaagagagtagttaactttcagtatctatctttgattaaaatctttgttttatgcaaagaacggcaaaaacattggaaaaagtgccaaaagtggtcaattaacccagtttaataaggtaaatttctaatctaaattaataaaattattgatcttataactttttgaatgtcttagaatggcgctctcagcattaatttttatgctagtttgaaaaataaattatcttaattgaaatctacagatttagtaagtttagctattacgaaattcagattctaacagtttaattttgaaagtaaatcttgttattgcaactgcagtttttcttttttaggattgccttgaattctaaattaaagatctaagaaatactctgttcattcgtatatgtaacgatttaactttacataaagtgagagctttaatcaaagataaacataatcaaaaatatgtaaagcaataagctgatgcattcaaaaaatatataattttttcatacataaccaaaaacaaataagcatctaagaagttgccttcttagatgcttatatattctataaactaaaagagtgaaagttgtttagaataaaactctttatactgactacttttacttaaacttcccttttgagtaggtgttgaagtatccagttcaagatgattaatcaaatcatacttatcagtagatttaactgcagtatgatttgcctttcttactcttctcttacgtttcttgttctccataataaataaatgactaatatcatcatttgaaagttttatatcaaatgcatgaaaagcaatgactttagttagataagttaaataatgatcatttagccaagcttcaatgacatggattaacggaacattaatcacatcattaccataatcaatataattattatacagagaatcaaatttatcaaaagtaggcgttaacttggaataatcaccaaataataatgcctgctttgcatcaaacaatttatatcgaaaatcattcggttttctttgaatattgtgtttattaaaccattcttttaggaaccgattattgcataagtaaatgtccctagtaatacctgagtaagccaaatcattcttttggagaatagcttttttaacatcagagaagttgttaatgtttgaatcaagatgattaaacatgctttttatttctcggctgttaagtatttgatctgcacttaatttggaaacagtattaaaaattaagcttctaaagcgaaaaatctcaattaacttttgtgcatttataaattcaaaacattgactatcatattcatgtggcatttttctgttgtagaagaaatatctggaaacagaaaatttatcttggtcaagcttaacgtggtcgtcagcaatcacaatatgatgatctaagctttcattatttgaagagtcagctatacgatactgaactctaaaaatatgtttcagccaactttttgatccatcttgaaacatactatcttgaatagcatttattgtttcagatgacaattcattagttgaaagtgaagcaattttaatttctgtgtcaccttcagctaccaagttggaatgtaatgcagcttccaatatgtattttaatgaaccaacaggtgcaaataaagttgcaattgccttcgaatacacttcaaaaatatttttaaacattaataaataatctccttttctttttaccaaaaaagctcagaatcagataaacgattctgagccttatttaaaattagaacaaagataattgcttaggctttgctgatacagagctttgctttttatcttcggtactaatctttttatctttagaataatcaaaactaaataaattgatctcttcatagtgttctgtagacttagtaagagttacagttaccttattgctatcactcttattagttttagcgacaggcttcttaagagcagatttagtagaggttggaatttcagttttagcaacactcttagtatctgctttttcttctgctttactttcaaagtcttcaaacagactatcatcatagtcatttagatcattattatatttaatagcttcaactttctcttttgctttatttgccttttcagcaaaatcaggatgtgaagtagcccattcattttcaaatttagtaatttgagcagtgattttttctacttttgcatccccagcaataagtggatctaagatctttttcttttcagacaggtattggatattagttaatttggcaaatgtacttgaacccacaccctgcttaataatattccgcttcttgttgtaattatgttcccagctctttagcagtccaggtaaattaacaacatagttacgaattcttaaggcgtaatttaggtgaaggaagtcagtcaaatcaacacgtaatggataactccccttgcctactaaaaagatagtagcacaggtgtgtaatccataagtaccagtagttatcttagaggtcatattgtagccagcttcaattgacaagtttgcaattttagcaataggcttattacccgtatgaccagcaccagcatatgcagcagccctaattgcaaagaataatttcttatttgcttcacgagatgatttaaatacttgtccattattaaagacaatatcaggtgctaaaaggctgtgtttaaacggcttagtagtagctatatcttctttaagacgatcaatatccttagcaagtactggagcttcaactttgcttctttcgtaagtacggacatcttctctatagttacggtcaaaagcatgtttttgattaaccagtaaagtcaagtcattatcgactttcatctttagctttagataagggttttgtgttgcaatagctttgaagtctgatgcagtcatagtttgtgaatcaacatcatgcatggctcttattggagagttattagtcataatctgagtaatatactttagcttgttttcttgaatttgccacaagtaattgtcgaaagaaccagtagtaatgtagtgatagatttcaacatgacagaacatattgccttgacggactaggcgtccattgcgctgaatgatatctgatggtctccaaggcacatctaagtggtgagcagccttcattctagtttgaacgttaagaccagtaccacccttttgcgttgaaccaattagaactcgaatatcaccagcattaacctttctttcaagttgaattcttgcctcatcgttagatgcttggtgcatgaatgcaatttcacttacagggatgccttttgcaaccaacaatttctttaattcgttataaacgtcaaattgaccggctttaggagtacctagatcagaaaagataatctgagtacctttaactttagtagttctcttccaaatacgataaacattatcagcaacttggttcaacttagttgaatcatctgctgaatatttattactaaataaacgcatatcaagtgtaagcttgcgagcttcattagtaattttaagcatgttatcttgatctggagtaacttcatggtcttgaatagcatcagtgcgatcaatcaactcttgcagtttagattgctgagcattagttaactctgacttaataacatatttagtagctttaggaactgataaatgagcgccatcagccatttgaacatcagcagtgatatgataaatattcattaattcaggtaggttaacaaatcgttcaaaacgtttaactggtctatatttattacctgttgtatttaattcaagttcactacgaatcttaccaaatgagccagcccaatcatcaaaattagcaatatcaaatttctttaaaatgtcaggctgaatgtaattcatcatcgtccataactcactaatagtattagatacaggagtaccagtcgcaaagacaacatgaccaaaatcatatttattttgcaaaagtctaatcttcattagcatatccatagctctctttgaagtctgactattgatacctttaattcttcctaaactagtagcaggagcaatattcttgtaattatgggcttcatcaacaaaaagaaaatctacaccaagttcttcaaaagttaagaagttgtcttggtttctaatggataaacgtttgatcttattagacaaagcttttttgtttctttcaagttgcttaacgctaatagattctcctctgtcttttaaagaagcaatggaattttctaagctatcaagcctatcttgaatgaaattatgttgtgcttcaacactagctggaatcttttcaaattggctatggccaataaccacagcatcatattcacctgaaatgattctagctaggaatctcttacgattcttactgctaaagtcttctgcagtagttattaaaacatttttagttggatagaatttaagaatgtcttgactgaactgagaaactaagttggtagggacaacaaacatcggtttattaactaagcctaaatccttgagcttaaagccagccgaaatcatggttaatgtcttaccagtacctacttcatgagctaataaagcacgcttatcttcaataattcgttgaaccgcatttctttgataaggacgtaaatgataacccttagccagcccattaatatgcaagcgtgagccatcatacttcttattaacgatacgattgtttttattgttataagtgtcttctagttctttagaccaggtagcattgttagtaatataatcagtaaacttggcttcaagctttttctccaagtcacgtagcattgcagtgctagtctcatctacttctctaattggcttatcgttcttgtcataaccagtgatcatagtgattgttggctgtttagattgcaataagtaattaaaaatggtgattggattatcatagccgtttagtgcttgaccatctctttcaatcttaaactcgttagccttagttgaacattcaacagagtaaactagttcggcaaaaggctgttctgcaattactcttcctttaggtgtatgaacaattaaatcttgatcttttgagccagtaattgaatcattaaaggtcttattagggtcaaagaaactatctaataagaaattagaaataatcttatcgggaatccatggcgaaccaatgtgaaaagagatgtcagcaatagtaagacgcttaggcaataccttttcaattagttcaagataatgctgccagttagcagcaaaatcattgctctcgattaattctttcagtacatccctcttggtgacaacatccccagaaagaaagtcttccttggtgatatattcagttttacctgtctcattgtatttctgcggatcaataatgatatgatcagctaactgatctatgatttcttgtttagaatgacctggataaatagttttcatgtaagtaaagtccatgccacgagcttctgaaacagaagacaataaagcatcaatagctgaatcgacttttttgattactctatttggtctaacagtagcttgcttaaaggctttgcttttaatgtagacttgtttaccggttttaggatcaagaatatgatcctctaagctttcaaccaatgcagcttttttatcttcacggaataacttagtattcttagaaagattaattgagccgaagttggccgcaaaatgatcataaatatcattcattctctgcaataaaaatttgaactgagtatcatactcaacacgattcttaccatatttaggactaagctgtaaattaattaacttttgataagtatctcttaaatcaatatagctttttagaatgctagtttctttagcagaataattagtatagtaaaataccacatgcttgatacaaccagcatatttaccacgcttattaggtttagcagatacgtagttatcataaattctcttttggccattatcagtttgtttacgatagtctgattctctacttgctgattctgaagtacctacatattcattagtagatccatcagtgtagtaagtaaattgttcaggcttgccgtctttgacaataccatcaattccattgaaatagataataccgttagcataaccatattcaaacaatggtagttttttgatcttatcaggcaaggtagtatctgctagcttgccttcttcaatttcaaccctaccgctgtcaacagagtaaagatattgagcaggtaaaatgtgaccaattgcagctggcaattcatttaaaaaatcacctttgtctactaccgtaagagtagcaccatgataattttgaatttggattgagcctaaaacttgttgtggctgactgataaagtaggtatttaaccatactcttctgtctaatgggtattgggatgcaggcataaaagcatcacccaaagtatccaaatcaccacgcatgtttttctggaaaaatagcatatcagttgtaacttgggtgccagcgatttgcttgaaaacatcagttggcattctaacaccacctagaaaagcaactttgttctcaattttctcaaggatattgttggttctcttatccattaaccctgtactcgtaataatagcgattaatccgtagtcacgagtaacatcaacagcttttttcaagaagtaatcatgaatgtagtatgaattattgccactatcatcaagtagacgagtatccccgaaaggaacatttgtaattaccaaatcaaagtgagcgcctttgaacttaacatcttcaaaaccttttacaaaaatcttagcttctgggaataattgcttagcaatcatccctgtaatggagtctaattcaattccatataagttaacttttccccgtagttgttcaggcatagtcataaagaaaataccagtacccattgaagggtcaagcacattaccgtgggtaaattcagaatcatcattttctgagtcagttaccttttgccacatagccctagcaatagctgggttagtgtagtatgccgttagagatgaagctttcatattttggtattcatcgtgtgaaaccagcgatttaagctcttccctatcattttgatatttaggattaaattcatcaaagaattcattagccaagccaccccagccaacataagtagctaattttgcttgctgatcagttgtggcttgtttaccttcttggtctaattctttaaccaacttaataatctcaatgttgttcttgatcttgtccgcatctctcttggggaagaaatcctcattagcatctgcaggtaagtaataattttgcatctgtaaaaatctcctttgttaatttgaaaaacaaaaagcagccactcttcttgtatgagttaactgctttcaaacttaagttaattattaattattcaatgtagttaaatggtttcttgctaacaatgagtgtcccttcattgcctaaatctgatgcaacaatgcttgaagaagcatcaaagctatagcaatcaatttcgccagaagacatattgtcttggtataatgctttatcagccaaacctttaagttctttctctgagtaatctttatcccaatcaactttaagacctaaagtagcaggaatatccaaattacctaaatcaactactttattagaaaccatttcagatagaagtggatgcccttgtgacatgtcttcacatctgtaacctctttgctttttcataatcaattctgattcttttgacatctttgctataatcattttcctcctaaagaaaaaagacctaagcgacatgcttaagccttaaattctattaattaataaacaataattttttaaataaacaacaataaatagcctaacaatatgcctacgaccaaaactcatatacagatgagttgaatcaaaataaataaatcaaagatttacttacgactatattatacaaaagatagttttgaattagaacaaaagctaaaaagaagagcttttttaatgagcctgttaaaataaaggtaagaattatatatcaactatgctaaaaagctcagtacaaaactgagctttttaaatattattcttctagttttttatttaacataattataaatatgttgattagagcagttctttttcaattgtacgaccaaaatctttaatttcatcttgatgttctgggtaaacactagttaaagttcctaataattgaaaaatcacagatcctaatggttcttgatattccttttttaattttttattgaaagcactttttacgttggtcatattattttttaccacttctgataagattccgttgacctgagattgattatcttgtacaaattcgtctactggtaatggtgattccccttctacatgagaaaatttagaaatcgcatttttagtagaattccattgtttgcttggataaaaccacttgttcaaatcaatggcagaaaaagctaattttagccaatttgcatttttctcaatgtgttctggcttatcgtctcctctacagaaagttaaaatattctttttaacctcagcaaaatctgtataagaaatggataagtaattggttctcggtgattcaacaaatatgcaatgccaatcggaaccattgttttgtacaaatttgctgactctaatcattttatcttggatcttagtttcatcatagccacgataaaagcctaaatagccaaattgcgataacttcaataaaattgacttttgctgggtttctttattgtaagtacccatgatcaattgggtacgcaacgtcttggctttttcaatcattgcgtcaattagactatttggatttagatgcaattcttgacatatatttgctaccagctccattaaaaggattgctcttttatcggtatcttggcaataaatggtttgattatctatattagagtaaaaaatgtaattaaagagctttttgtctgctcttaatttctcaagcttttcattcatttcctttaattgcttgttagcaaattgaaccttgctttcatcagtaggttgttctaaatgattaaagtcttcgaacaaagagcgacaatgatctaaatcatattcaaaatcgaacagttctggtctcattttgccaatggaagatttaagtagttccaaagtggcagagaaattaaattcacgtaaaaattgttcttgcaacagcaaattaagtaagtcatgtgtcaggcttttttcgtgattatgatcaatcgacttgtaaatcattccctctctggaaccttgttctggcaagacatacagtataaccgaattagcccaaatctttttgacatctgaaattatttcttttaaatcttgattcattttcttattaattagattagttcttaactagcctaataatcctttctatttacttttgtatttttataatacaaaatttttagtcttcaaaacgaaagttgaataaatattagatttcaaagaaaaataagcattatttaacttgaataaatgcccaatgataatgtccagccgttttttgctttcctcgacaaaccgcactaatatattgcttatttattcctgttttttcctgagctactgttaagctagcatatttttccttagtatcaagattaataactggttttaatttagattcggatattaattttataccacacttggggcatcctgcatgcattcttgtgcgactatctatctttgctttccactgataaccacatttctgacatttccaccacaccttatgatcagaatgaggaaagtattctgaggggcttttatcattttgaacatcccattctagtagtaaatcacgtctattatgtttagcgcaccaattctccaaatcattgtagccttttaatactttctttttattgcaaatcgggcaattgcactttaaaactgttctgttataaacccccatttggtattcatgcccttgaggacatttccaccatactttctttggcgtaccatatgagaccatacttggaagaagctgaccatttcttgtgggatgccactcttttgcaatatcagggaacaattttaaaagagatttagattttcttgatttaatatagctttcgtaaatataagatgcatcttggcctagattaatctttacatgattggatttattcaaaaccttaaatacttcttgaatacttgaagctaaagaaacagattcctctggattcttttctatgatatttacagaatcattaagtgcaggtaaaccatcctcacgaattctaatcaatctaatattattttgcctacaaagattatctttttttgcatctcgctttaaatgtttgcgatgccattcgaagccgtcatattcaatggctgtacgtattgatggaacataaacatctagttccattccaatagtattttgatcagaatttatagcatctggaaactcctgctttatataaaaatatattgcttgctcaggaaaagaagtatgattttccttatcacaaattgggcagtcactatggttaataccggttttattgtaaggataactagaatacgaatgaccaaaaggacatatccaccatgcctttttagtagtcttccataaaacatttgatggatttaaagtatttttactataatcccattctttcataagacgtggacatctagtttttaaatcgttaaaccctgaatatacttttaagtcatcaatataggggcattttctattattaattctttgccttaacgttaccttccacgaaaagtcaaaatgatttccagtctttggatcatcataaggagtcaaccgccaataatattttgagcccaatgtgatgacatgcgaaggatcaaatttatttttcttttcatcccattcagcaaatatattaggatattgctttgataatttttacttccttaaaagtgttagttagtatttgtagagtttgttttcttttcgcacatgtagatttacgagtatcattttctggtaaatcctgaaatgctgacattttatatcctttctcgtattatataaattaaatcagtgataatgattattcttttagtttgtttattcgatcatcagatgctagtctctaattgtcattgaccttggtcaattggtataggttgtttccttctgtagctttgactacttttttagtctgccgcccaagcagttttactaatgacttactcacatgctgtatcgattctggctattactgattcagagcagattcagtcgcagctttttagcttgaacctatgaatacttatattttgcgagattgtcttagaatctgtaattagggactaacatgtgatgatcgatctatgaccaaatatttgctagaaaggaggccattctcaatgaaactttttatcggaattgacgttagttcaaaagatcttcaagtcgctattactgactcagaaaattatcaaaaacctttacttaaccaatctttttctaatgacctgattggtgctaatgaggtcaaaaagataattcttcaacttgctaaacagaacagctatgacaaagtaattatcggcatggaagccacttcaatctatagctttcaccctgcttatttctttgccaatgacgaagatttacaaaaaattaatcttgaaactgatgtcattaatcctaaaaacactaaacgatttcatgacgtttacgaagaaaataagaatgatcctactgatgcctattacatcgctgaatacttacgctttggtaaataccatgtcactattgctcggcaagaggaatacttagctttacagcgtttaactagagctagatatgaaatcacatcttcgctcactagagctaagcagcacttcattgaaactctttattatcgtgtaaacaaactagttaccgttgacaaagataatattaaaacttctatctttggcgcaacgatgctgtcaattgttactgatagtaaaaccatcgatgaaatcgctgaaatgccaatcgaggatctaattgactaccttcaaaccaaaggacgtggccgcttctctgatccagagactttagctaaagcgatcagaaaagccgttagaggatcatatcgcttaggtaaagtcatgaaagactcgattgatgccgtattatctgtttactatgccgaaattaaaactaatcagaaattgattaagaacttagataaagcaattacagatatcgtccaaacgcttcctgaagagagaatactacaatctattccaggaattgggtcagtttattccgctggtattatcgctgaaatcggcagtattgatcgctttgacactgaagcacagctagctaaatacgctggtctagcttggcgtcaaaagcaatctagtaattttgatagcgaacacaaaccgatgactaaaaacggaaatcattatctaagatattatttggttgaagctgccaacctgattagacaaagagatcccgtttttcggaagtactatcaaaagaaatacgatgaagctttctattctccgcataaacgcgcttgcgttctttgtgcaagaaaattaaccaggaccattttcactctgctcaaaaatggtcaaatctatcaaacaccgaggtgattaattggtctaaaacatttttggaggagtaaataatagttgttaaaaaatcccttgaaatagggcttagtttcatgcacgcaaattttggttttaaaacaaactaattaaaaataaaatttaacttttacattgacttattaccacatgactaaagcaaattggagaagtggatttataattattagttattaacttcaaagtacgaactaagtcttagaatcgccctctcagcattacaataaattaaaattaacttgatcaagtaatgcttctcgtctttcttgttcaagacctaaatatcttaaagtcattgcttcactggagtgatttagcattttcataactaaagcagtattatgattagtctgctgataaaccataaaagctcctgtttttctcattgagtgtgagccaatccaattaaccccaattttaagcccggtctgatgacaaattctataaaaactattttctcttattggaacatcctcacctaatctcctagaacttggaaatagccattcagaagaaaacagcttcgtgtagggatgcttcttttcatattcttgcagccaatcatagtaatcctctaaaacatccctaactggagttaaatataatcggttaggcttttttgtctttttgtcaacgatataagcatttttcttaactctgccattggcttgaaagacatcattctttttcaaagctagaacatcacttacccgtagtaaggttgctttaccggtttgaaatatagcatagtttctttctcccatactagtatcttcacgtaaatgtttcaaaaacttctttaaaattattggatcagtaattggacgagtatctttatgcttcaatttacgtctccttctgtcaatttttatattagtccttgatatacaagtatttcgtcactctatgttgaataattagtctatagctaattatactacataatcaacacaccccaaaattggcatagcagaataatgcatgattagatgtactatgtagaataatcttattattctacatagttagaaagtacaaaaaagaatgctaatttcccataaaaataagaattagcattctattgcattaaatgattaattttaacctctgcagtcgaacttgacctcagaatcgtcctctcagcataatcgaactagccttaaaattggcataattgttttacctattctagtcccaccatatcattcacgaaaccttgaagtttgtctaatagctgaatatttacgtgattaacaatttctccatttctagattcaaagtcaaaattctgaagttgccataaaacaacataaccttttactccagtgccattactgcctggaattaatattggctcgtaatgtgggttgccttgatatttatctgaagtagtaatcggcatccctataaacatatgtgttgatttattataggcactggtactcattaccacataatgtcttctaatattacctttatgcggattatggccacccatttcatgtccggaatgaggttctgcatctgctttaacaatatctccctttttcggataaatcattaatcaactacctcacgtcccactggttttactgattgtagttccacgtcattttctatgtctttttgataatcataattttgccattctttggttgcaaaaatatttttctttttcttcacgacgggtgtaaaaactatattcatcccctcatttttcacagtatactctttactagtaattattatatctttaggaactgttaaagtttttgaatttccaacttttcttaattttacagtcatagttgtacgcctctttcttttttgtgtatatttagtatacacaaaattacaaagaaagtaaattatgttttagcgttacatcaatagatggggagatattctttgttctttctcctagctatttgtccttattgcataaaaaatctaaatattttaaataaatttagcatttttcttttttgcgaatgtaactgctgagaaaactgtatataatagctcttgacccctttagaaaaggaatttagttttctatgaaaggaattaataatggacccggatttaaaattgaagtgcaacaccaagtgttaaacaaaaaggccatgaagacctaaacttgaagtgacgaaaaatcaagaaaggaagatcttcatgaccaattcaaattctagcatttctaagcactatcatcaattaaccagcgtacaacgtggacaaattcaagcaatgctggattccggcataacttcccgtactgttatcgctcaagaagtcggctgccataagtcgacaatcagtcgcgaaatcaaacgcggaagcgtcctgcaaagagacagcagctatttattgtatgagcactattacgctgatactgcacagcttcattatgagaagcgtcgcaaaaactgctatcagcgcaatccattgaagcattatgctgtctttttgagaatgctctccagacgctttaaagctaaatttgatgccaccagcatcgatgaattcgttggtgaattcaaatgccaggctacccttgtcccagcacaccaaccgtctatcgctatattgatcagggcttgctggacataagcaatattgatctgcctatgaagctcaaaagacgcaggaacaagcgtcatcacggccatagcggtcatgctttgcacaagaagcatcttggcaattccattgaacagcgtcctaaagagattgaagacagaaaaacgccgctgcactgggaaggagatctggttaaaggcgtcagacgcaagaatcagcctgctttaatgactttgaccgaaagaaccacacgctttgaagtagttatcaagattcctgactatcgggcaagcacatgcccaaggctgcttcaaaatgagattgacagacatcctgcctggtttaaatcgatcacgtttgacaatggctctgagtttgcggatatgaccaagatcaaaggctgccagatctacttcgcccacccatattctccatgggaaagaggcaccaatgagaactgcaatggacttctgcgtcaattcttccctaaaggcaaaagcatgaaagataagtcagctgcttatgttcaacaggcaactgatgccattaaccgcaaacatcgtcgaatccttcaatatcacacagcagaagaactcttcaagcaatatatttcctcatagcctaactgttgcacttaatttgacaattcaggttttagaatatgctatacttactgatagaaagtgtgtaggatttacatataaaggtgtaaaacatggcagtaactattaaagaaatagctaaaaaagccggcgtttctattgccaccgtttcgcgatatcttaatcagaatggttacgttggcattgattcggctttaaaaataaaggaagctatcaaaaaactgggttataaacccaagaatgcaatttccgctaaaacagaattaaacttaattgaaatcaatttttcgcaaatcaataatcctttctattcagaactgtatgaatacttggctactattttgcaggataaaggttatgattgcattttgcatttagatcattatcaagagcaagatatgcagtattatttggataaatataagcaaaaaaagatcgtaggcttacttaccagctcgccaattcagatttcaaagaagagtggcaagcttaatctaccggtggttagttttgaccgggtaattagtccgcagatccctactgtgcagtcgaataactatgatgcggagatgcaaattgcaaagtcggttttaaagcaaaaaaagaagaaagtaatcattattgctggttccaaagaagactattatccaatcagtgatcgtatcaaagggatgatgtgtgtgtttaatacctttgacgttaaatttgatttacgctcaattagcgcccgtgaatcaattatcgcatcgtaatcgctatccttcaatttttgaaagataacgattacgatgcgatttgttgtacggatgacattacggctttattggctaaagaatgcaacgattatttaaataaaaaatcgttaattacaggatttgacggcacacaattgattcagaacctattcccacatttaattagtgcgcggcaacggactaaagagattgcgaaattaatgatccagcggtatcattggagagtgtttatactttgcccgttagcttgattaatcaggattaaaaaaacaggattgcccattttggaaacaatcttgttttttaatatttttaattaactatctaaatctaaccaattcttttaacatttctagccttaataaagctaccatcttttaattgatagaatttcttccctttaatcttaacgaccttatcagaatgaagtgaaatatgcttattcttcttaagtaaaatgcgctttccattcttcttaactgctttaccatgcttattataaacgaatgagttatgagctaacttatagtaactaacagtattagcaactttgacaaattgatttttagctactttatagaacaacttacctttaatactatactttttaccattatccaaaggcttaattgtatctccagctttcaagacaagcttgttatcattttgataaataggatttgcttcactgtcatacacataagcattatgggtcaataatatttcagtggttgtattatcctgagtagaaactgtagtagtctcttctgatccattaattatatttttagtattgtctataatactattttcacttggagcttcaggtgtaataattgtttcttgcggaacaattggattggctggcttttgatccggaatccttggattttctggtgtagttggtttacctggcttatcacctggagtggttggacttacaggctgatctggttttggcacgtctggtaaaaccattgttccatcttcatcaactacaagtgtacttaatggtgccagcatagttttatcacttaatttcacattgccatcactatctaacaatttcttaccatgtgataaatcaacattatttagagcaactttatcattgttgacattaaagacaattaataacttcttgccattaacattatattcgtactcaaatacacccttgatgtttttatctttggtttctctaccataactaataattttagtaacattctcgtcataaatcttattgaaatcattcaaatgcaaaattggcagctgtttacgtaatttagccaatttttggaaatattggactgatgctttattagcaccaactctttcccaattaatttcattaatatttactggtgaattatatgaatttgaattgccacctttagttcttaatgcttcttgacctgagtggaagaaagaaataccctgtgaaagcatgatcattgagttagccaatcttactctcctggcaatattctcatctgattcatttggcattgcagccttgatgtaatcatacaacgtcttaccatcatgacaagcggcataattaaccatttggcttggagttgcatagttatgtggctcccaagaatcattatgtaaccatttacctcttaaaaaactatcggtaaacaagacagcatgcttatcaaagtttttttcattaccgttaccaattactaatcctggttcggagccatcattattacctttaaccgagtttctcatatcatcactaaagaaaccaacattaggaactttatccgcagtgtattgggtcgttccttcttctctagtatatttctggttaccaacttcccagccttcaccataagtaataataccaggatcaatcttatctagagcagctctaacatcattcatagtctctcgatctagtaaggacatgatatcaaaacggaagccatctagattgtagttcttagcccagtaaactactgagtcaacaatgtacttgcgaaccattttacgttgactaccaatgtcattaccgcagccactatcacttgtggtattattatcagcatcgtaacggaaataatatcctggcactgttaattcaaaagcttgctcttgaggattataaacatggttgtataccacgtccataatgaccctaataccagctttatgcaggccattaatcatttctttcatttcgataattctagcagttggattagttggatcagaagaatatgatccttcaggcacatcataattctttggatcgtaaccccagttgtattgattctttaaactcttagtttcatcaatgctagcgaaatcatatgaaggcataatttgaacatgagtgatgcctaatgccttgagatagtctaaaccagtaacttgtccagttggtgtcttacctgattcaatcatccctaagaacttacctttatctttaattcctgagttaggatcactactaaagtcacgaattgaaatttcataaacgattgcatcagttggcttagagaatgaaggcattcggttaaaatctgtcggtttgatattattgtagtcttcaattacacttctaacgccattgacagtaacggctttagaatatggatcatcagtctgtgttattttgccattaccaaaagttaacttaaaatcataagcccagccttttttatcgcccttaataataccagtccaaacacctctatcgcctcttgtcaaagcaataacattcgtaggcttggcactattatcaacactatcatataaattcaattcaacatctttagcagttggagcccagagtttaatttgcgtctttttactatcataggtgcagcctagatcgtcaccatcataggcatatttatcgtcaaaagctttggaacgaacataaggaccgatatcaacatttttaaagttcatccctagtccaacttggttatcctttaaaatatcaatatctgttttggtatgaataataaatttctttgctttaccatcagcattagcatcgactgcttcaatatgatcaatactattatttcgcagactaagttttcctttaattttatcgacagtagtagccttacctgcttcaacagtcaaactatctggtgaagtcatatatgcagaagatagactttgatcagctaaggcaaaactcttgctataataagcttctgtatcatttttaactaaataaatatctgtcgccttattacccggtaacggagtgaattctcttgttatttcatcagaaccaactggcgcaacaaaaagtttactaaaatcagtattgtctaatttgattgagccatcttgactattgccttgtttggttaagctaataagttgtttattatcttgatccttatctgtccaaacattaaccttattaacttggtcatcaccgtaataatgcaaatttatatttgcggaatggtactctggtgttaccttttgggcatcatcactacctgctttatagaagacttccgctttgccattatcgctaacatttaagctacgatcagcacctgtaccgtctttaccagcccaactgcctttggttttaattaaaactcctacttggtcatagtttttatctaaatcaataaccgagtaatacccattatcatctttgccggcccatttgtattcattgccgttaccattaggtttcttaccccaaatataaggaacccatttttcaccatcaccattgtagtgaataactactttagtctgatctttaacttcctcacgtgctggagagttatttgttccctcatctttagttttggctgccaaaactgtaggaacgttttgaggagctgcattgtcctctgcagcatgaacttgagtcgtagttaagtttgcccctaaccaaagactcataatagctgaagtacatacaaaaattgatttaaatttgatattatgaccactctttttattcataaataaattcctccacaaaatcatgttttttcaaattcaataataaacgtatgcgctttcattttcaatagttaaacaacttttatccgcaaattgcaataataaattgaacacttttggttaagctgtttgatagatttgatccagttctctttcaaagatttcatctggtgtatgataagccaatatctttcttggcaaggaattacaccaagtttcaatgttaatgatttgttggagagaatagttatggatataggcgcctttaggaatgaatctgcgaataagcccattatgtctctctacagttcctttatcacaagaagtatatggatgagcataataaaccaaggtttgggaaatatcttccagctgagatagatctgcaaattcagagccattgtcaaacgtgatcgatttaaaccaggcaggatgtctgtcaatctcattttgaagcagcctttggcatgtgcttgcccgatagtcaggaatcttgataactacttcaaagcgtgtggttctttcggtcaaagtcattaaagcaggctgattcttgcgtctgacgcctttaaccagatctccttcccagtgcagcggcgtttttctgtcttcaatctctttaggacgctgttcaatggaattgccaagattcttcttgtgcaaagcatgaccgctatggccgtgatgacgcttgttcctgcgtcttttgagcttcataggcagatcaatattgcttatgtccagcaagccctgatcaatatagcgatagacggttggtgtgctgggacaagggtagcctggcatagtccttttgaattcaccaacgaattcatcgatgctggtggcatcaaatttagctttgaagcgtctggagagcattctcaaaaagacagcataatgcttcaatggattgcgctgatagcagtttttgcgacgcttctcataataaatctgtgcagtatcagcgtaatagtgctcatacaataaatagctgctgtctctttgcaggacgcttccgcgtttgatttcgcgactgattgtcgacttatggcagccgacttcttgagcgataacagtacgggaagttatgccggaatccagcattgcttgaatttgtccacgttgtacgctggttaattgatgatagtgcttagaaatgctagaatttgaattggtcatgaagatcttcctttcttgatttttcgtcacttcaagtttaggtcttcatggcctttttgtttaacacttagtgttgcacttcaattttaaatccgggaaaatattatttttcttttgagctaattccatattcaagatttcttgggtagacattactgttcgttcagccaaattgtcagcatcagcaagtacccaatagttatcttgatctaagtcaaaacgatttttgttactattttcgggatatttctcccattcttcccaatctttgtcgttcggtgttagtaccacttcatcaattatcaagttatatccttttttagtaatacaaccgttttcctttgctttcagaatagtgtaaatatgcattccgtcaaacaacgaagtatcttctgtaagcttatgactatttgctaataactccttaagctggtcttgagtatatctgatattcatatatatgtcactcctatttagatttagttaaaatgtttagtcattgtcttgagacaatttaaatttaaccattgtcccatcaggataagccaataattgtgtagcaaacgcatcgtctttcgaatccatatcatctgctttaggtgctttaggcttaatatcaataattgtttcatatccttttttattaagggatgcatataaagatttcagttcattaatattgttagtgccagttttaggagtaactttaaattgaggatcctcatctacccaagtatgttcatcatcaatattagtagtagtttgatcgttaatttttagtttaacattgactgtcatgtcaaagccttcactttcaaccaaatgcatagctttaagcatgtcttgataacttccctttgattttatttttagggtagctcgataatcaataccttgtttagctagtgattttgcaacatcaaagggagtactaagttcctcattcttcttctcttttttaatcggtgcttgaaaatagcagctaactttataattgccctcacgataagatttaaacaacttaaccacatctgaggacccaacttcagttaaaatatcagtatgcttagttgtcgtttgcttatttcctttaacggtttcatctacaggaaaaaccgtcttaacattgtatattttctttaccatagagaagcctctatttctttgcgtttaatttttcggctagaatctgagcaaacttgttcatttttctagtttcttccctttctttttcctcctcatcatatttttgcctaagagtggccatttgatatttaagttgttcattcttatgtctacgcttaataaatttaccgaatggtgttgcagaccaccgagaatcatagtaatcagcccaactaaaggtatgattataaacatcaatgttttcatctgtatagccgtaatgccttaagatttcttcacaattccaataaaacagttgtgataatgtactagtaggatcatttaatttagtaaacgttggatacttcttaataagttcagcacgcttcttatcccagctatctttaaggttattctgctcaaagaaattattgaacttgtaatctgcaataccctcagtagcatgatctttaacaagtttatctaagtattgatcaattaacttaggatcaagaaatttcaagcattcattttcaatttgattaaattcttcttcaaacttctttgaattttcatcactttctttttgcatcaatttcattgctgattttagtgctatcatgttttaataccttgctttcattaagatcttcatatttttatcttcacacaaagcataaaaaaagagttgcaatgtaaatacagctcttttatcgcctaattcatcaatagatgggaaggttgtcctttttcctaactgtttgctcttattgcataaaagcttctaggactttatacattctctttaccctttcagttctttgaactaatgcaaacttaattttccctctagtagaaaagtaactttttccaatactgttatctttttattacaaaaaaagaccatacaagcatataacttatatggccttaaaagccaaattaaatatattgtaatttaccagctaaagaattatcttgcatcagtaaagttagcaatttcttagcagatttatttggctcactacgattgctttcccaagcttctactgttcgcttagaaacaccaactaaatttgctagacctgcttgagttgtcccaatctggtgtcttaatgtcttaatagttttggcattaaattcgactttcacaggtaatgggacgtctacaacttcgacatggctgtcatcaccatttacataatcgcgacaaatctttaatgattctaaaatagttgatttacccatcattatcgctcctttttaaagcttttaataaaagctttaatctcatttttctcggtatccgttaaagaagacttctcttttttcccatagaccgccaaaaagaaagcacattgctctttctcctcaaaaacaaagtaaatagtacgataactgccacttttacctttatttgatttttttggagcaaacctccatttaatagctcctcctgttccttgaataatatctccaggaaacttattaccgtaactattaagcggagctttcaatacataatctaggaaattatgttgtaagtcctctctatcttctaagctcaaacctgccttactccattgtctcataaatggatcaggatatatgaatctcataatgtcctctttctaaagttttactaaaaatagtataccataaatacgcttttagatatacgattatatcgtactattgacattataattcaatagtactgctcatcaaacttagtaaaccttaattggcgttactaagttaatgatctcactttgcttatccgttaagggattaaccaaaaatggtcttaacggttttgtaaatgaaaatgcaacttcatcaattccatcttgcttataaacacgaagaatctcataaagataatcagggtttgcagaaatttcaagcttatctccatcaatatcaatagatgttacatcttgttgacagttaccgtacgttttagcattacttgaaagtgaaatgctcttttcagcaggatcaatgttaaaagtaactacgttgttttctcccgaatgagaaataagacggacacgatcaatgaactccataaaactttcagtatcaaccgaaaacttagtagtttcatcttgtgggataagtgcatcaacttgaggatactctccttcgatagtagttgaaacaaatttaatctcgtcacctatcttcagaataaattggtcgtgattacttgataattgcaacttactttttacatatggtaacaaagtttggataaacttaagcgtattaactgataatgtagtatcaattttctccttaacgcctgtattcttctgaatttcaaaagaagacaatctatgtgaatctgtcccaattgctttgatactatctggcttgataataaggtgaacaccttgtagtatctctcgtccttgagaatcagcagctgaaaatagcgtattatgaatcaaattgcgcatttctgctgcatccatttcaaaatcagattgacccttttctacttctttaggtttaggaaagttgctactatccattgtattaagttcataagatgacttaccaaacttaattgtagtagtaatagtatcatctgattcaatagttagttcatcagttgccttaatttttttaatcatgtttaaaaacaacttagcaggtagcaatacactcccatcactgaaagtagtacaatccttattatctttaagcctcatcgaaattccatattcagaattttgacttgtaaaagtaagacctttaccagctttaacgtctaacttaatcatttgaaatgctggaatagaagaacgttgatctactcctttagcaattactgatacaacaatattaaactttctcaattgttctgcattaacgataaacttcattttaaatacctccaaaattaaaaggcacaacttaagtttagcctttctacaaatactaaaatttaaacaatatcgagtgaataaaacgatttcactttacctttccaaaaataaaaagactattcagcactcgaaccaaacagtcttcataaacaatataaaaattgataaacaataaacagctaaacaactagcttcaaaccaaattcaactgacaaagttgaataaaaatcaagaatcacaaaataaatattcttgactaattaaagtttaacatcttctactcaatttggggtatttttgcaattataactttattctttatctaactgattagcccaattcattaactcttttttgcaatcaatcaatgtagtatctgccagaaatgattctgccgtatcaaatccaataaataagtcagtatcattaattttttcttcttttcctgctgcagtaattggtaaaaaagcatctacatattcatttaattcataaaaatcatcaaaattatcacgatttttctttactaaactgtaaattgggtcagtttcttttagctgaatataacctgtccaccattgtttgctattatccataaaggattctttaaaaatatagatgtttctaccatgataatgttgcttcaaggctaacgtactcatttatctatctcgtcctctttcttaaaatatataaattaattatataaaatttatatttggcttataaaaaatactaataaaaacaaaaaatgactaagcttagttagccattctttattcatgatactaattaacgatgcatttttcttttagcacctgctaatcctaaaatacttcccactgttgcaatacctaaaccaagtgctgtagcggtagaagcatctgaattccctgtttgtggtaattcatctgtccctgtgtcattcaaactcgaatcacccgtacttgagccaaaatcattaggagcatggacaataattgatgatgcttcagtagtatttggcgtagcaaccatttgaccattacttagatgacttgcaaccggggatgcaacagttgtggacttagaatccaggtcactatcattgctgctattactacttgaagctttcttggtttgtgaaactgcattattttcatttgccgactgatttgaacttgttaaattatcatcaggaacttgtgggacatttggaactgaaactgacggaacagtagaagtagaagctgatggttcagttgacgtgttagaagaactaccagcatcagaatatgatggcacatacacattgtcattatttgtgttggtacgataaggaacccatacgttaattgtggctactggacttccatttgcttcattgcgtgcaagttcagctaaccaattcgtattatgatttaaatcaaaagttaaactggaaattccctgattacttaccggcaagtaatgtccaccaaagtaattgctataggcaacatgaaccacaccattcttatctaaatagtaattatcagtaatatggtctttaatcaaagtattattaaatggaattgccggtaatgttgcgttattagctgtccaattaccccatgtggtagttccatcaactagatccaaacttccttgacgattaaattgcagtgtaaccattacatctggatcattagtttcatcagcaggatctactggtgcatttggattacccatgccagaaaatggaatcattttaggcccattttcgtaataacctttaacaacttctcttatcgtagcttgttgttggacggtcttctttgcatgggtaaagtatacatataaaatttggtctttaggattttcatcgttatcaaaagttagctttttagaatctaacttattatgataagtcttgccattaactttaattgtttgattgaagttatcatatcttgtatcaagattcttatgcttaccatctagcataattacatgatcaagagtaacgtctttgttaccgttggtagtagcggtatcaagcacataattcttactagttaaatcagcaatttctgaatttactggattgtcaattgtactttcaggtgcatgaacctgaccatcatgtctagttgtaaatttattgccaatttcttttttgctatcttcatcaatataatgaacattaatgctctccgataagttatatggtacgactactctaataacagcaccatctttaggaatcacatttgaaacagttttggcatcaattaccttcccattaattttcttactatcaaaagtaactcttaaaggattgctttcagtaacatgttgaccattgatcgtttcttgatagtgacttacatctgggtctacatgatacttattaatatgattatcatctaagccacgaactttttgaggcaattcaatagttggtaatgctttatcagctgaagttaatttccaatctgaccaatttgaataagtatccgcaccagtttctgtattgtgataatgagtacgactgcgactataagttaaattagctggattgctggaaggataagtataaacatcatttcctttatgtgggccattaccataaacgtaatttactacttcttgaacagttctattttcatcttcaacttttgaagtagtatgagtatcagtagaagaaggctgaccagtttttgactttgaagtagagtcaacggaaggtgccttagatttaactaatgactgtttgttctcaacttgaccagattcgggcttagaatccttcttttgagacttggctatatctaaaatctgttccttagtattagctttaattttactaccagtattcttttcagattgatcgttctttgcttttgaaatgtcttctttcttaggttttgcagcattttgctttctatcctgggtagttgatgatgttacagattttgaatcatttgctttaactacttccgtagtttgcgactcaccatctttaacttcatcagcgtgagcagtggtagattgattggtaagcgcaaaagtagttcctagcattactgtcgttaaaccaactgttaattttctcagtgcaaatttttgctttccatttaatctagcattgaattctgaatcatttttatgtttcatatataatataaacctccatttaactagatttttttgattcagttttagagtagccttacccaagatccctttgaaaaatgcaaaacaaaggacaaaaattctcctctaaattgctaatttgctaataagatttaattttaggtaaaaaaatagcatccctaaaaatagggatgctattactcgtaacttaattaatcataactaagtcataagtaaactgatcatcatcacttaatggcttgagatactctaagtaaccccatgctttaatgccaccgatattctgacgagtaccaaaattaacaatttttactggtctttgccgattagttggaaaagtaccaggattaattggacgctcggttgagtagtaacgatatgacattgcattagtattttgttcttccatgattaactcctttaattagaataaatccatactagaattagtagcttcaggctttttttcattaaataaaaaagcaccattagctaatttctgatatattttctgataaaaccgattataatcagtaattttttcattgctaccatcagcatgctctacgctataaccaaattcacgtttttgaggatcagcattaacatagaaacaatcgccgtcttgaaaaagacaaactgaaattttctttgacggtacgtccacatgcttctgttctaaactactgccattagactgacaatagctatttgctttttttaaagctttatctagcatctccttcatgcgaccttcataataaagttcaactattcttttctccattctttttgcaccgaagggacctgccccttcttcaagtttaggatcaaaatagtcgtaagatttttcaatgtatcttctttccttaagtactttgcctttccaattttgagcattgcttaaactataatcatgattctttaacatgacatccagatcaaccttatacacttttttttgagtatgatctacattaatttgcagattatctttacatacaccctttaaaattttttttgtaagcattttattctcctaaaataatgaaatctgctgcagaacctttttcttcgacttattattctgttgctgaactgacaccctagtatcttctgacctatcccttttatggttagtatccatatcatgaatgttagggacaatatctgaagcagagaaactatcatactttttagtagcagtattaattagatcatttctgtaatcaaacgaagaacgatagccactcaccgtgccttctgatgtttttttatggaagtaaaaacaatcttgcgtttgatcaacccaaagataaaatttaatatttaagccaaaagtacaaataggaatcgtaatagttcccattacttccgtcttattaaaaaaagttttgcctttttgaattgcattgtctagacattcattggcttgtttaatagcaatccactgcttaattgtttctaccacatcatatccattcatattagtcagactttgatgtttacctaaaatgtcaccttccaaagtgaatttcaagctttcatatataaaaggatcttttccagttacatggtacttaggatcagaaattgacttgacttgatcgttaatcatcgctttcaagtcaacataatgctgagttgctaaagaatgagttacatacaattgaaaattatattttttcattgcttttacgatagattcatttaaagaatcattcaacaccttcaaagtcatattatctgtgcttgataattttgccatacttaaatacttccttttaaaaaaagatcagcaaatttatcaatgaactgagacctaaaagttagacacttttaggtctttttctacgtaaagtcaagcataataagaagtttggcttcattttttgtttaaatttcaacttaaacatcttttagtgtcgatttatttttttagttagacacgacaaataagcccagatccatatctgatttttgggcttagcgttataatgtacttgatcaattaattacgactaaagtctttttgattatgtgtggctacgttgtaatcatatggttgatcattgataatcagggcataaatggttctgattagtttatgaattgaagcaatagctatctttttgaaccctttggtttgagaggatagctttttgctttcataataatctgctatatgacacggatttgtcttagctgcattatcaatttgtccaatagctcgataaagcaacttacgtgcgactgcattgccatgtttagtaatacttaaattagagtccatttctcctgactgatatctgcctggatcaattccgataaaagcattgattttattaggattactaaatctgcgtaaatctcctaactctgctaaaactctgacagcagtggtctgtgcaaagcctggaatgctttctaggttttctaaatcatgattaggcaaagacttcgctaacttaaccattcttgcgattaaattttctctttgatcacttaaattaagcaatctgtgtgcataatactgcacttgctcgacttctatgctagagcaagatacaactggataagcttgataagctaattcaattaatttatctgcagtccttagagcgtgtttaaaagcaatcccctttaagctcattaaccagttaataagctgttttttatcttctcttcttactaagtcacaatgaggatatcgcacaactatttgccagtaatttttacctttagcagaagaaaataaattttcaatttcaggaaaagtcgattgtagagcttggtgaagtcgatttttagctattaccaagtcacttgtcagctggtcatagaagcggctcaaagcattaagctgcttataagtttgggattcgctttgattaaccggatggcgataaagtctttgaattaaagctaaatgataagcatcagttttatcggtcttgttgtagcgtagccccatattcatctcttttttggctttaagcggattaataacaacatattcatagccgtagtcttcaagaaaagcctgcagtctgcgtgaataaacaccggtagcttcaaaaataatttgcggatgtttagaaaaagcggttaattcatgaagcaattgaataaaaccaggacgattattagtaatggttagttcatttttgctttcaccaattagttcacaaacagtagaagtagacttgcttacatcaattccaaaagtaacttgcataataaaaacctccaaaacttagtagtaaaacgtatttacttaagaaatcagatctaattttctaaactcgacatctagtgtccacattcttcgaagagactattgaaaacttaagtaaaactgccagtttattatgcgacatcaagtgtctaaagacctcagggcatatcgttttaccactactttaattctacaaaagaataaaaatagtgaatcaattatcccgtcggataactaattcactatttagcttagaatgtttactatgtctaaatttaataaagaacaaaaaatagaaatttatcataaatggaaagatgaaaatatctcaatcagtcaattggctaaagcgtacagaatgaatctagctaatttagactatatgcttagattaattgatatgcatggaatagaaattttaactactaaaaaccaaagctattccaaagagtttaagcagcgaactattgaacaagcaatctttggcaataaaccatacttacagctgtctttggaactggggtttaaaagtattggcatgcttaacaattggattagagaatataagaaaaacgggtataatgtcattatcaaacagaaaggacgccctgcccgtgaccaaagaaaagcagaaatctcgcaaggaactggagaaagagatccagcagctgaaagaagaaaacttgcgattgcgtattgtgaacgaatacgtaaaaaaactaagtgccttggaccaagaagatcagaagaaatagctagggtgattacggatctaaggcaagaattcaaagttagtttaaattatgtattagctgcgattgcagagcaccctgagctacctataattgccagaagctcatactacaagattatcaaacgacagcccgccaagcctaaacggtcaaagcttattgctagaatccatgagatttttaatcatcatcaaggccgctatggatatcgcagagtagctttgcagttaatcagagagggctggaaagttacggagaaaaccgttcgctattggatgcataaattaggtcttaaaggcatcaggcgcaataagcgcaaatattcaagctataaaggtactattggcaaaatagctccaaatttaattcatcgtgatttcttcgcagccctgcctaacacaaaatggtatactgatatcactgaatttcatcttaataatgaaaagctttacttatcgcctattctagacggctgcggtggcgatatagtatctccaaacatccagatatggatttagtaatgacaatgcttgacaaggcttttgccaaagaaacagctcttaataactgcatttttcatactgatcagggctgtcagtatcaaagccctcgttatcagcgagctttaaaactccatggtattactcaaagcatgtccagaaagggcaactccatggatgatgggctaatggagaacttctttggcctgctcaaaactgaaatgttctatgatcaagaatacaagtatcataatcttcaagaattaactcaagcagtcgaggaatatatcgaatactataacaacgaaaggataaagagcagattaaaaggcttaaccccgaaagagtatcgaagtcaagcctctattaatccaatattttaattgtctactttttacgtctcagtacacaatgctgatctcttatttattttattaattattactttctatttccttaatcaattcaaatggtacgctataccaattatcattatcatgccatccggcaattcctagactagcaagttgaccatcttccagttcaaccactgaaaggccagtcgttttatcccttaaaagctcttcataagcttcaagattcctttccttaagttgagctaaaacggacttggtcaccgcatacagattatttaaatctgtacttgcagtaattaaccctgttggaaactctaaattagtagtaccgttttcgcaccaaacacttgagtaatcatcacttactaatacaaaaatttttttactcattcttaatacctcattttctttcaaactttgccttttaaaaatcatacttttcagcatcgaagtccgaaaagaaatcccaatctgataaaatttcttccgcacaatctaatctctccgtgtcatatgcacgacaattaaacgtcttgtcgaccaaagtatcttccaagatactaattaagtcatctaaatcagtaacaaaatcatcgtaccaatcttgataactaatggatctgacgatacctaaattgcttaaatactcttcacacttacgcttagttaattgaccccattgctcatgtagcccattatcttcttcataagttttaagtaattttttgaattgtcttctacaataacttctgcctttgctaatttgcttagctaatttgaaattaacttccattattaaatgcctcctctactaactaaaaccttttcttagtgccaaactggtaagacagcaatagcactaagaacaataaagccaaagataattgccagcattaccaagttaaagctgataacaacactgacaatatctttaaccaagaattttactaattttacttttttctgcacttttcctcctaaagcatcaaccaaaaaagacattgaaaaattttcaatgtctcttcgcttttctaataaataaaacaataaactgtcactttacgtgatcataaacaatacatgcccaatacaattaggctacaaccaataccaaactacattgcttagtaattaaatcaaaatgaagtaatcaatctgattacacttatataatacattgagaaacttaaaaacagtttttttaaaaataattgctaaattttgagaaaaaatctatctactttttaacttcaacctaaatatgtcgatttattcagtattatcgttagtttgttgctgattctgatcattagaattatttggttgattattttccgtattgctgttggtattattactgtttttgttaccttgattgttctgattattctgttgcgtttgattactgttttgattctgattattaggtctacgctcaataattactactcgattagagttgttgctatcaaatgtagtattagggttctcctgatatcttctaataattcttcttggtatccgattaatattctttttcttctttggtgctgcaggcgcatgtcccttttgaaataattctcggccagtgttaaagtttctagttactacactatcaggcatcgtccagtccatattcaccttatccttcatcaaataatccatcatacttttatataaaagcatagctgaattctgaccactaccagtaattttaccttgcgctaaagtatcataaccagtccacactgacattacgtagcttctagtgtagccaataaaccacgaatctttaggtgtgccattatatgagggatgcgcttttaattcagcatttgaatatttaaccgttccagttttgcctgcttcaattaaatcgccatctttagcttttaagccagaaccgtgagtaattacgccctttaacatatcagtaatcatataagcagttgatttatccattatacgagtacctggagtatcataattatgaatttcaccagttgcagtctgaatacgagaaacaaattgtagtttatgatacatccctaatgtagcaaaagcactgtaagcacctgccatttgtaacgttgatgcattagcaccaatcgctactgataatccttgacttggctctacattaactccaacttgcttagcaaatttggcagcacgtttgattccaatatcttctaaagttcttaccgctggaacgtttcttgattgctccaaagcatatctcattgtcatagcaccatagtaacgattatcccaatcatttaactgaatatgagttcctgcataagtgtaaggagtatcatacaaaatctgtgatgttggccaatgcttatattgaattgctggtgcataatcaagaactggcttaatagaagaaccagtagatctgccggtttgtactgcacgatctagccctaatgcaacattaggcaaatgtcgaccacccaaaattgcaattacatgaccattatttggatcaactacagtagcagcggcctgcatttttttattagtgaaaggtaccttcccactatttgctaattgatacagttcatcttgggctttttgattaatatttactgtaatcttcaaattgtcattataagggtcaaagcctttttctcttacttcgtctacaacttccttaatataaggatcatcaattttgcgaagtttagattgcgtatcatgcttataagtcaacccatgctgaatattttcagtaattgccctggaatactgtgcctgagtgattttgccatttttcaacatagcctgtaatactaggtctcttcgatatttagctctagccggcgtaatataggggttatagaaagttggcgcattaggcatccctgccaaaagcgctgtttgtgataaatctaactgatctagttttttaccatagtaatagcgtgcagcggtaccaataccatagatattgtaattcatgtacaccttgttaatgtaatactccagtatttgttgcttggaatactctcgactaacgtgtattgctatccatgcttcttgagctttacgttttagcgtacgatcagaaacgctagttgaaaaagctgacaatttaattaactgctgagtaattgaagaaccacctgcagaaatatcatggccacgaatattactgataattgatcctccaattcgaattgggtcaattccaaaaggctcattataaaaacgtttatcttcaattgatactacagcatctttcatttgttgcggtatttcattatatttaacataatttcttttttcttgtcctaatgtcagtagtaattttccatcactggtatacagagtagaagaaccaccactttgtaattgagcctgagtaacttgtggtgcgcttttagcatagtaggcaaataaccctattccaagagtaaaaattagcaaaaaaagcaaaaagatcccacgaaagatatttcgaactacatgtcttgccttatgatgcggacgtaagcgatggggctgatgacttttagcttcttcattgctctcttcctcttcttgataatcatcagaatcatcaattgaataatcatcttcggtttcaggattatcattatcaaattcagagctatattgatcatcacttgatttattatcgttaacttcacgaggagatattttctcatcatctggcaataaattatttagaccatcataaaaagaatcatttacttcattaaattcatcatttttatttgatcgatcatttgatgaataggacttatcatcgtcattatttctcatgctgaccgccctttcggtttaatatgattctattgtttaattctactgatttatgagatacaaatagaaaagcacatttaagcctaattactgagcttatataaagaactgaacataccttatgtaatacttttgtaataataaccctcaaattgattatttctcaacgaccctgactttggctatattatttagacataacgaaaacaaaaagtctttatgaccgcttaattaaagcaaggaaaggaacttaatagcaaatgaaattatcagtacgacaagctattctatttttagttggtggtgttgctggagctgtcggtattcaacaaaatagcagtacagcacatgcggaagtagtaacagttcataaaaatgacactacttggaagatttcaaaagatcatcacactactgttcatcaaattgttaaagataatcaccttaaagaaggcggttctaaaatttatgttggccaaaagttagatgtaaataaacctggtactcagagtaaagatcatcataaggcacctaagaatgtcgcatatgcagctacaactactaatcaaaataatggtcaaaccagtaattatagttcatctacacaaaatggttattctgcttctaataccactcaaggttcatcatacaacagtcaatatcaagcacccgtttcacaaacacctaagtcttctgcttcaaattatcaatcaactgctactggcggtgaagccgctgccaaagcttggattgcttcaagagaatctggtggcaattattcagccgtgaatgcctcatctggagcatacggtaaatatcaattattgcctggttacttacatggtgattattcacctgccaaccaggaaaagacagcagataattatgttcatggacgctatggctcatggcaaaatgctaaagctttttggcaagctaatggttggtattaaaaagtgtttcatttatgcagatactcgtgtaacgagtatctgcttttttaataggtagggaattaggtaacaatagaacttctctgtctttagtctttttggatatgcaaaagtccgctataatagtaattagtagttaaatgaaaaggactgaattactaatggacgaaaaaggctatgctaaactgattaatactgaactacaagatttaccgcaatacgtcttttactatgctcagcaacctttagcaattacaacgatctaccaatacttaagtgaatacagacgattttttacttggcttcgtactgattctgggaagttaggaaaagccccactttcctctgctactaagaataaaaatgttgaattatctgtcttagagcatttaagagttattgatgttcaagcctacctacgtgatgaagaaactaaaatcaataagcaacaaagtcacgattctaaaaaaactatcaatcgtactatcaacgcactacgttccttatttcactttttaactgtaacggccgatttaaataatggtgaaccctacttctatcgcaatgtaatgttaaaagttcccctacaaaaaggagcaaaggaatccatatcttacagaaatgaaaaatatggccctatgctttatatgggaaagaaaaaacacgaatggcttgatttcattgataaggactatgaaaatcaaatctctaagcgagccctttctttttttaaggtaaacaaagaaagagacttagctataatagccttactacttgcaagcggaattcgtgtttctgaactagcacgtttgaacttaaaggacttaaatcttaaaaacagaagcgtaattgtaattagaaaaggtggtcaaagggatgcaccactaattgcagattgggctattccctacattcaaaattacttagcaattagaaaagagcgctacaaaccatctcaaaatgagcaagcattatttttatcaaaatatggcaaaacaaaaagaattgctacaaatactattgaaaaatttgtaagtcaatattcacaagcttttcctggtgggcaaagaactaccccacacaaattgcgacattcattaggtacggaactatttggcaagagcagagatgtaatggtagtagccacacaattagggcatactggaatttcagctacagatcagtatattcaagaagataaagctgataagcaaagaaaaacacttgattcaaccaaataagacaaaaaaagctttatgttccaagcacattgtactgagacgtaaaaagtagacaattaaaatattggattaatagaggcttgacttcgatactctttcggggttaagccttttaatctgctctttatcctttcgttgttatagtattcgatatattcctcgactgcttgagttaattcttgaagattatgatacttgtattcttgatcatagaacatttcagttttgagcaggccaaagaagttctccattagcccatcatccatggagttgccctttctggacatgctttgagtaataccatggagttttaaagctcgctgataacgagggctttgatactgacagccctgatcagtatgaaaaatgcagttattaagagctgtttctttggcaaaagccttgtcaagcattgtcattactaaatccatatctggatgtttggagatactatatcgccaccgcagccgtctagaataggcgataagtaaagcttttcattattaagatgaaattcagtgatatcagtataccattttgtgttaggcagggctgcgaagaaatcacgatgaattaaatttggagctattttgccaatagtacctttatagcttgaatatttgcgcttattgcgcctgatgcctttaagacctaatttatgcatccaatagcgaacggttttctccgtaactttccagccctctctgattaactgcaaagctactctgcgatatccatagcggccttgatgatgattaaaaatctcatggattctagcaataagctttgaccgtttaggcttggcgggctgtcgtttgataatcttgtagtatgagcttctggcaattataggtagctcagggtgctctgcaatcgcagctaatacataatttaaactaactttgaattcttgccttagatccgtaatcaccctagctatttcttctgatcttcttggtccaaggcacttagtttttttacgtattcgttcacaatacgcaatcgcaagttttcttctttcagctgctggatctctttctccagttccttgcgagatttctgcttttctttggtcacgggcagggcgtcctttctgtttgataatgacattatacccgtttttcttatattctctaatccaattgttaagcatgccaatacttttaaaccccagttccaaagacagctgtaagtatggtttattgccaaagattgcttgttcaatagttcgctgcttaaactctttggaatagctttggtttttagtagttaaaatttctattccatgcatatcaattaatctaagcatatagtctaaattagctagattcattctgtacgctttagccaattgactgattgagatattttcatctttccatttatgataaatttctattttttgttctttattaaatttagacatagtaaaagacctaaaagtgtctaacttttaggtctcagttcacataaagtcttttttgcttttaatattattaatttggcatagatagagaatatataaataataaataaaaatttaacattattggtctagcataggtcgaaaattcaatagccttctcctattcacggttattctaaatctaaaataaaaaaatggcaacttaaaagccaccagagatgtattctttgatggcttttaatagtcattaattaattaaatcattaatggcttgattatttttttgcttccaatcttttgtatttactttcgatttctgagaaatagtagaagattccgaattaccttcactagatgaaatagcacggttagatgaactaattttatggttttttgctaccgtagtgtctgaatctgctggtactacagtatcactttcttccactgcattggggttcaaatctttttcactgttgaaagccatatcaggggtaacaatctctcctgttttactatttacaagtaaatcatcaggagctatttcttccttttgaaaattagcttctttatcttgttcttgttcagaatagtcaacattcgattgatttaatggctttatactactacgatttgaatttaaatatgcatcaattgcatttttactacgaatatcagttggaattattgtggtgtacgaagctttggattgtaaatggtgtccaaagctactcttctgctcatttttttgttcttccatttcattctttcttttcttgtagtaaaagaagaaaccagcggcaatacaaataataactaataaactcattttaacctcctataaaaacaaaaagacacttaattactaatcagtaactgagtgcctttatagatttaataaaaataaacaatattaaacgcattagcgctaataaacaacaaaacggtcttaaactttagacctaaaaccaagccttagaaactatctaaggagtaaatcaaaatccaaaataaataatggtttacataattattttatcattctttccttcatattactattttcaatgtaagccatagttcttgcagcaagccaagcagaatatttatatctttgtttcttaaatctaacataattataagtttctcgctgaaagttttttttaaccttcttaagtaacacaacatgaattttacaaatatgatttaaactataatccactaacttaatttgcatttgtaatttcttagcttcagcaatattttcttgttgcttagctcgcattttttgtaaagatgtcatgaagtttttacggtaatgatgtttagtgtagtaattccacgatgcttcaatttttttattctttttaatcatagcgtcccatatttggtttctctttgtaatcgtatcaacacgagttattttgtactgctctacattagctagaaaaaatatttcatccccttgtagcaactcttgtggtaattctagccacggttttgtcaactttacccataaatgatcggcaattatatgtttacctttaacatcaataaagtcgtttttattagctaatcttatctttttatcttgtgaatctacaagatatacatcagttaatagaattacagggatcttttgatgctgacgattaatcttatgagttatatgatcaaaagttgcatgataatactgtgctggctttccaaaatattctgctagtctaaatctttgtttgtccaaattaattatttactccaattttcattgataatgtagtgattgttgtacatattaggtattaattgaccgttatgataaacatattctactccatcaacttgattaacaaccttccaagaatgattgcaaaattcttgattttttgctaaaaaagtagcactatgctctatttgatcaatagtgagaatattatttctttctaattcttctagtttatgtagcaaattgttatttttcatttttaccctaatatcacaaatagcaagacttaactataatctacattgtaacttttcgctgttgtaacaatcttttaagtatgtacatataagaaatacgattatagtagtaggtttgagtatcaatgcaaaagtaagccggatttatctctgcctttttaaaagctatcttaaatacgccactaataaatcctgtttctctacacatctcatcaatactaataatttctgatttatcttcaagttgctgtaattccgtcttagtaatttgtttgactagagccaacgtttcttcgctgttgatagttggagtcgcagcaattttctttttaattacttaaaggagtttttccgcctctttcttagctacaaatctaaaattaccagagtactcagaaaattgcttagatttaatctgcttttgcttaaccatccttctaagcatttcaggttttaccttactgttaactacttttacttactcatatttactaatactattattagcaatagattggttaagttagtacctgtgaacactgcattcagtacttgtaaacccgctacaatattttggacaggatccaagccgaggatttgagtaatcggaatgcctaatgcccatgaaactatatatgtagtcactactaataagacaactacaatatcatctcttataagagatgaagaagtagtatgcgtaggaacatgcttatactcctgataaataaggtagattgccttaattaaaaccagaatagtaagttactcagtacatagcgtgtcactgtagaaaaagctaataagacgtttgcttccatttcttcaatcattcaaattattccctttgctttaccaccaaactgtattcatactagtattagcatttactacaggcagattgtcatcaatattgaactcctctggatgctcctttaggaaacttacagcctcttttctaggaaatggtgttggatcttcaaaaaacttaaattttttaagaacatctgccgaccaattcttgataacatttttaatcttaggatcatcttgggttctaattaaatcaatggttgctgcaactgacgtgtaatgcattcttatagattttccgatttctctagtcattaagcgcatatgtcgatataagccatcgtcatcacaatccagcttgtatccctgtcctaatgaataaatagcactgtaataatcatagctctgcatatacaagttagaaattttgtgactataggcttcccctttgccaaatggatgaaaaacatgtttttggtctaagaagcccatttcagcattctcccattccatcttatgattagaattttgacgataaactagtaagctttgtttatctgtatatataagcatttggtagtagatagtaatgccaccaataggaagttggtgataagacaatttatagtccttacagttaaagccaaaattgcttgaaattgtgtaatattgttgtttagttgccataatgctcccctttcaaatcaaatttagactaatacttttaaagggaattttttcttttgtaaatatcaatagaattaatttgttttccacacaaaaaaagcattcacagtacatcaaaattcagtaccgcaaatgtttttttcactaaaagacttacaattcagtccgaatattacagattaagtctccgttccataatttaccattatggaagaactctactctacctgtaactggatcaacagttctattcaatttaaccatttttcctttcaaattatttgaatcataggtctttattcctataattttagcctgctcaggattatgaacaagcataaacttgttttgagcgtccttagtaacttctaaaccaatatcacgagaaatccttcctttttcatctaaaggatcctcacttagccacttgtacccagcaagaaattcatcaatgctaatgtttccaatttcatgccagttttcaaacaatttgctcttaccactatctactaatttcttcgcatgttcatatttcatatggctttcctctattttcttaaattcgtagatttttctaatacattaaaaatcttcaggtctgcaatatctttccccataaagttctggagtaacataagtaccaatttccgctggttgatcacgatatttctgctcgtctttatctaactcagctttttgccaaatttgatttaccttcttttcaatggtagaaatatccaatgacaagaagctattaaattggtgacaataagagttaacatctgttccataataaactatcccatcctttttggcttgttcattaaactctaattttccaaaccagtcatagtacatatcacctaaaatctgagacataaattcagcttttactggtgaaaactttcttctagcatcagtagaaacagcatgaatcttttgctctacatcatgagcagtaccttgcaccaggtttcgttcttccttagtaaaggctgaatcaactaataacaacatcaataacctccaaaagaaaaaggcttaagcacatacttaaacctttttactattattaaaataaacaataaacaccactaaaagtgtcataaacataaacgaagtccaactgtggactttaaaacaaagattaactacaacagctaatccacgaatcaaaataaataattattttattgattcacctttatgttaacatcatcctagaaaatctccttaaaatgcaaagaaagctaaaattagctaataattcctaactaataaatatttaaccttacgttttgaaatatttacaggctcaaattggtaggcaatagaaagatcatcaacatttaaatgtgtattcaagaagagattcttggtagttggggtattatgtattagcagaatatatttagtattgcattgtcctagtattcctcttaacctttcctcatcagtagaattaaaagtttgttgattatagcatgtagcatttgtagcagcagggggcattaaaaacataaaatcatccgtagaaaatttaggcactcgataactaaggaactggacataatctgatagagaaaaattagtgtcactaaactcagtagcgaattcttgagagccaataaaattcaattgctctttcaaatctacttgattatagtttttgccaccatacggacaagtataatttccttgattattgtaacgatacttaaatggatagctggtcatttgtaagtagtagaatagagccgaaaattcaaaagttcctaccctttgggcaaatgcatggttataaagctgttttaattctccataaattgctttttttattgcagtagtaatcaataatttgacttgctgctcacttagccttgacttatttttttgtactttacctaaaaaatccaatatgttataaccaacatctcgtgctacattatctggggcaactttaagagcatcaatattcgatgcagcattatatacaatcttttcagatatttcatctagtgattgactcaaattatgtatattactatcttccttattaatgtacttagataataaaattacatcttcattcatttcaggctgaatttttgattgctgtagcaatactgatatttctttcacaaattttaagaaggtttcatcttgtttagcaatcatagtccaaacattataaagctgcggtgactgacaatttaaatacgccttacctcggatataacctttgtccttaatttgttttaaaagaacatccgaaccaaaaaaaggatcataatattttttaatttctttaggtattagatttaaaacgaatttgagtgaagtagtatcaagactagggtatgaaaataaatacattttaaacatcttctttactactttaatcatatacgcttaatttatttacgtctgcaatgttaatttaaccctatttttacttaaacaaagtgcgaaaaaatcatatattcggtttaatttttatacttcatgtctcataataactatgaagatagtgataagaagatgtttttaaaagatgtatctttgcatcgaaagaattggagatattcatggaagcagaaattaagtatttaaatgttacagagaagcatttcttaaaccatttaaatttcctacaatcaatgaatcaaattgagacgaataaacctgcgtctttgtactttacgactgaaagcgaagatgacggaaaatttcatagttacattatcttagcagtttacaataatttaattcaggctagtacgtgtttaaagacaccatttttagtctcatctacttatactagagatattgataaagaagcatggctagcttatcataaatggattagtgaaaataccagtttctttcaaaatctattaaatggtcttgaagacgctggatttaacgaactaaaagtattagaaccagcttatcattcaatgatgaatatcatttatgacttaaagttaaaaactaagcaacaaaaagatttgcaaaaagatcaaattcaactgatctacagatactaacattgtcattaatctatgacctgtatctaggaaaaatcaaaaatttaaaaattctactaacccttggttaggcaacatactgcatattatataagttatatgatattatatactcagaaatgattacacgtaatttataaatgagtacgaggtgctaaaatgagtacagcaatgagtaaaagcaaacaaagggtgcaagctaatattgatccacagctaaaatcagatgcagaatatattattgatgaggtaggattaactcctactgcagttattaatgggctatacagagagatagtcgcaacaggaaagattccactatctttctctttaaccccagagcaaagagcagatatggccgtaaggcaagcatcagaaaaagtacctgttagaaagctaagaagcaaaaaagaaattgaggatttctttaatgaggactaatgatatatatactacttatgtttcttggggtaaaagcggaaaaaggcgtccagttttaatcattagctctacttcaacagattttacattttataaaattactagtcagtatgctaaaaaatcaaagcgaattaaaagaaattattatccaattaagcagtggcaagccgcaggtctgaaggaacagtcttatgttgatattggagaaaaagtaaatttgcttaaggacactgtaagaacggattatgttggtaggtttactatagaagataaattcggtttagctaactttattaaaaacagatataaataagaaatcctattaaatcaaggtttagcaatttttgatctgtaccaagatttaacaggacttttattttgagtaaaattaaaaaattagttaaagcatggatgtcatttacttaatgactcatttttcttattcacactatgctgaatctcttgttcatcttttttagtatggccaaaataatcctgttgattaggatgagcttttaaaaaagcttttctatccaatgaatactgatcatccaatggaatattgcctatttcacgaattctaaaataaggatttgtaggattcagatatctgcgaattggaaagttccactgatttaattcattggtaatttcagtctgctcccaatcattttttaatttactatattcagccgccctagtttcactatctgttttctgggcttcttctgctaaacgttgcagtttttcattgtcatgcagtatagctatgtcttcatctaatggtgtcccatttgtatcatttctaattttaaaagcaaaagcaaaggtatcaaaataaagcaagccgaaaccattgataaaagctcgtcctactgcgaggaataccccagcaacatcagctaaaaacttgccctgcggtattggaaacctaattgataaataatgcaaaagaatctgcaaaggtattgcacgatctaactctggtggtcttttagttagcctatctggagataaatcaaagaagaaatatctaaatggtacaaagccaagtattgctattgctggtaatggcttagaagtaatcgcaaaatatagaattcctcctagtgttgctatccagcaaagaatcaaagctgagatattaaaaaggcgtgaaccggagaaagattcactatccttttcattaagatgtatcttattatccaccagttcacacctcttttactatttaccaaattgttctaaagaaagcatcaagattagtaccagacaagtaaccaggatgatttgctttaaagttacgtacatcccgctctgtatatggcattactcgattttgtaagaagccatcagcatcatcaactctatgagaatcattataaaagtcagacataatcttagatgataattccttttcattttgcttcatatttccattgaagaataattgataatccttaccagtatcaacgttaaagccattcaaatcatcactcttaagagggatagaaaaattagtttgttcaggtaatgactttaagaatggattagatttagtttcgttggataatgcttctctgacacctgtgtatggatttacaccagtaactaccatagtatctttgttaccttgtaaggcaaaacctgagtaacctagatatttatctacagtagctacaccatcagcttgatttgctctagttaaaacattagattgtggcaaatgagcgaaatcaccaggagtagtttgaacttgtgaacctaagttaccttcaccaaagaaattacttaaattaggaataccattagttaatgtagctcccactcgttgatcattttgaattcgatatggctcactaattgaatgtgtgcttacattataagctagactaggtctgcctgatgctgacatatccatatcttgatatacagtatcaccataacctaacgtaccatcgccaggcccaaatttacctacattaaaccaattaccattttcatcttgggcttgtaccgttgattgcgtattttgtattgccatgcgaaatacaccaggctgaacaccaattggtttttcacgactatctaatactttaggcatcattgcatatgcagccttcagtgataatccatgagcttgaggttgcaaatatggattatttgtaattctatccatacttccatcatcattaaagcctactgcattagtaccataagtagctgaactagttttatttgagttaccacctaagcctacatttccaaaccatgaacctaaattgagcggatcaaaggcttttgaagctttagtagtcatatcctcaaattctgcccattgatgttttgattgatcatagtaagatgctttatctgcattatttacatagtcgtcaatatcttgtgcattaggatttgcttgtgcatccccaattaatccaccataagcattcatattttcgccattgtagacagaatcaaggtcttgcgcagttactttaggcattccaccccaacctgaattaatagtattagctctttgctgattaagctgattccaaagtccagaatcaataatttgtgcagttgctccgtcaccaactaagctcttagcagtctcagttaaggactgcccttcaattggatcagcaactgaaccaagactagttgctttcttggtaggaataccagcttcttttaagcccttaacagcttctgatttaaaaatatcactattaataattccatcaggattttctttaattccttgttggaaactagaatcattaactgaatttagaatccgaccattagaattatttaaagcggcttgtgcggcatttttagctttagcatcaattcctggcttatagcccttctgatattgatcagtcttctgccaatctgcaaaactcatttgagtaggatcagtattaagaattactccattgttatacttagattctaaactgtttaattctttttgcttagtggcctgactaatatgctgagcatctaagaaacccatcttatccatcaggatatgtgaatcattagctggtgcccctgcgaggatcatcgcttgatctccaatttgttcagcggcttctttttgttgcggagttaaggaactatcattattaatagcttcacgataagctttattaatatcagctaatgatttgtaattgtttttgccgttacgaagacgtttagcccttgcctgaatagcttgatcagcatcaagcccaccatgcttttcaaattgtctagcagcatcggcgtcagcaactgcttgctttaattcagcattattataataatctggagccgccttagctttttgaataaaggtatcataaccaggagatttatctaatgctcgttttaatgcatcactcgttgcttggtcggtaattccatttaatctacggcgaagttcatctttaaaatctcgattagggtcagcttctttaagagctaatttagacaatggccctgaagtcaatctagcagctcttgatccaatttcgccacctagtcttgacattgcaattgctgtagctggatctccagcacctaatcctgcagacatgccagctacctcgccaacacttcggccggccatacctctaactttggcatcaacaccggccaatttatctctcatttcattaatcggagttttttgattccaagattttccgaaagctttcttaaatgctccggtcttagcaccagctttagccgctttagctgctttgccggcggacatcaatgctttacttcccgctaaagctgatacaccaccagttgccgtgctaagagccaaacctgcagctccgatagctacgccacctgcaacagcggccccagcttttaacgaatgagaagtacttctatggatttcatctaacatatgtgtctgcaaaccaaacaaatctgccagtgctttagacaatggttgaaacattaccataataataaatccaataaccattgtttcaaagtgcttataggcgttacttacatctactcctgggccaactatacctacaaactgacctatgcctttaattgcgtcacctgcggctccaaggggatgcccactagtagttaaatcaaaactatggtgtaatgtttgaccaccagcttctaatttgcttttggacttaatatccgcaacttccattgaccaattatcagagttccatgccataaggacagccataaatgttatggttattgcatggattgactgcatcataactgttccgataatttcacgaagccagttaaccgtacggattttgccccaatcacttggccagaaggcaataaacactggccctaaagcccaaagaatcgtaaatacaacctcacgaacaaagtagtaatatttaatgtaaactgctaagccaatatatgtcattaagtaaatgacgctgaagataatacctacgaaatcactacctaagaatgtaccactggtcagcatattaatagtagtcttactaaaccctagtgttactgcttccgataaaattgtgtttccagttgaagtcgtagtttgtgccataaaacccgctagtccagtaacaatagccccattgactgaaagaatcaccgaaatcaacaaattatactctaaacatccgactacggcgataacagtatcaaccaggctacgataccattctcgtcttgattcaacaggattaaatgcttggccaactcccattttagttgtttgaatgattaaaataatcataatcaaaacagctgatagagccaagaagaccggcccaattactacacctaccccttgaatactttgagtataagcagaattagggtagatttcggcatagccattagcattgtaagcattagcaatttcagagtacatttgtgggccagaagtaccagctgtgtaattaatgccaaaaatcgtagctccagctcctgatttagccatccactgaccaataccagaagagtagaacagatctagtaaagctttagctacttttccgctaaaagttgaaggctcagaattagctcctgaaacatttttgctttgttcgttatttcctttattgatattattagacgacttacctaaatctttatttatttgatcaagaatcttcttacgtttcttatcattctttaaatacttattatatgcatcccctgttaggttcatcacttctgcttccgctgcagcacgagttaattttttaccatgctttttacggttagcagcccatttactgaaattagttttgatatacttctgaatattagcattttccttattagtcagacgactatctcggccaattgaatctagcgtagtatttccctgattagcattagttaaccaattaccatttaaaccaatttttacatgttttttcttattccaagcatcaaaggctttgttataacgcttagcttgaatatagcctccaccagtagaggaaccagattgaatacgatcagtttcttgaccaatatttttaccaagtttacttatttttccttgtttccaagtctttttaattcctgcacctaatcctcttagtcctgacataaaagctggatccttaggattaagattagccttaatagcattggtaacttgctgagtggttgtttcatcaccccaagtaggcatagttactttggcatatgctacaatagccgtattaattactactaaagtaacaatagcggctaaaactccaatccctatctttgcccaagaattccatggagaataagtatttgttttttcttttctatttgtttgagaactattcataccatgcacctactctcacttattgcttaagcttttcattaatttcacgaactgcatctttagtttttcttgccagttccacagctcggttagattcagcaaattccatttcttcttgactaggattagttttaatccaaatactgtctccttctgctcttaagattccttctcctggctctggatttcccgttaaaatatttaaagcaccatctgttaaatcaatagcgtccttcattaactgacggtgttcaggtttagtttgtagacaaaacataaattcactgttggtaacaagggctttagcttgcggtctgccttggaatcgttcaatatcttgcgttagccagcagagggaaccattacgtttacgacaacgtctaaccatcatttcaaaaaagccaaacattactggatcatcaataaattgcaaaatttcgtcagcgtctagtacttttttagttgtagctttttctggattggtcatccaacgttcccacaagtatttagtaattacataataagccacacgcttaagtgaaccaacaagctgtgaaatattaaagttcacgtaaagatacttgttaaggtctgcagtacggccattcccaaaataagtttggccatcaaagattggcttgcttcctgtacgtaaataaggttttagcccgtcaagcagtcttgataccttagggtcttcactgccgtctggcaaagtattttgtttagctaactcttgataaatgtcagttaaagtcggttctggcttaggaattcggtcatagaagcgcccatttagagtaccagctttatcttcatatagtgaattaggatctgcggtaatacctaatcgcttaaccacagcattaatcgcatcttctaaccgactggtttcactgacgttcagacctttttcattgccattagctgataaaatttcattaacgaaaccttcaacattagaaatcattgaagagacatttactttttgaacgaacttctcaccgtcttcatgtgtaattacttggcgtccatcattgctaagcttaatttgatcttcaatttcttgctcggtcatttgccggccgttttcatcagtttcaatttcttcttcaagtggagtttcagttaatgaaacagcacatggattaatgataaatttagcatctgatgtaatcgttaaatttaactggtgcaagtgctttgctaataaaacatattcaccatcaggatcaatactacgatgctcaaaaccaagaatggcaatttctcgttccattttgattttgtttgtcgtacttttacctgaacctgattctcctacaattcccatattgtagttaattggtctatgggtcttggaaccaaagacattcaaaaattcagtattagcagaaggcgttgcttgatttgtcccaataggtattccaccgttaaatctacctgcagcattacgagccatatccataactgataaacttttacgatcgacatttctaaacgtatcatcaaggttatacattctggctccaattggaatagtttgtaaatacccacttttaactcttttaacataaggggttaaagaaataccttcattagctagtaagtcttctgcaacgccaaagttcttattcatttcacgttccgaattaccataaacaatgatactgatatttacgttatacagcctattttcatcgaactgcacttcatctaacaggttatcaatatcactgtatttcgtaatattctcacgcatctggaatgtttgccctttatcttgttgatactcagaattggagcgaattacgttcaaatctttagacaattctttcataatatttctgcgctcacgtgggacaacatccatagtcaaatcaatattcccttgtgccaaaagttcttgaaaaatacccgtatctaccatacgtggataccctgacggcggaacataagcagctattccatatgtcctgtgcttcatagtctcacgcataataaaatattcctgcataacatcatctgttgaccaatatgaattggcaataatattaattaagctaggttggccaatagctgtgctaggggaacgttgattatcatagaattcatcttccggatcttcttgttcatcttgattgccaaaagcttcgtttgaatcatcatcttgatcttcttcagtttcttgatcctgaccttcaactgattcatcatcttgatcattttttgaaaataaatttttaaaaaagcccatacgcttatccttcctatttcagattatctagccctgtaatatcaataccatcatctggggatgcattctcattctcgcctgaagcaccattagcttctggggaagcattctcttggtcattattagtagtgttagtctctgaaagaatatcttctggaaccttaaaaggtgaatctggttcttcttgaaattcatcattatcttcgattgaatcatcatcttctacggtagcttgtgtgcctttggaatctgcagaataataatcctgccccttagacaatttcttttcattctctgcctgttgctgcaaccacatagcgtccctagcatgattcattaattcagcttcaatcttgattttttgttgtacttctttaaaaagcttgtctgattgatgtgctgaagtataaagtgagaatctttgtttacgaataatatcctcaaatctcatttttacggaagattcacgattaaatgtcttatataaaacttcaagcaagccaaaagtatctaatggatttaatgcatgatccgctctgcgcaaaatgccattagcgttagcgatttgtcgtagtaatttttcaagtgctttttcatgtatttgcttttctagcacttcaggggtatctccataaacctcatctggctgaataattgccataaattgcaggtaacaacgattttcaaaacggtcagtttgatgttgataatttaaggtattatcaattacatcacgagcaattttcttcatttccttattggaattttgcaaatattgagaatgatcttttaagctatttaaaaaatcagtcatttcaatcttttgactttgcgaagatattttcagtgggcgatgtacaccattgtaaaatacttcttgtagtgcattatcttgctgtatttcttgatctgtttttaatgaaggattagactgttgcatttcagctagcatgatgaacattcttgaattatcaccggtctcgtactcaatcatggcgtttcgaatatctaaaacgccaacttcagccaggaaatcttcccatgtctgccagtcctcaaagccaaagtctccttcataaactggagcagaaccaggatcgtcttcctcgctctctgagacatctattgcatcacctgaattatctctaggcgttaagtcaaaattttgttgctgtgaatgtcgatgccaaataattactgcaacgattattgctgtaattgcgagaataaaagatataactactaaaatttttaagcacccctttaaaaaagtaatgttaaagctaacggccaacccctttaattcgaagaagttggccgctgaatttagcattatttatctacgcttataacgaacattacgtctacgacggctattcactttacttgtattgctaccagcactaaataaagctctaaaaaagccaacctgtcttactcgttgagtaaattcgcctggctttaatgtcgtcttatatccaattaacccagcagtccaaatagcaactgaaattaagatagttgtcaaaatttgcgtattattagctacggcatcgactgtaaggacaagccaaacaacaaaagtaccaattaaaattaatctaggtctattaatattagtcttttgatttaatctttttggtttacgatctctcatcaatcgtcttcctcctctctatctaaaactgcatatggtaaagctcggtttactggatgatgaggtggttgcaaatttaaatatgtaccgatttcatgagttaaaaatcgtctatttatcataatttgcttgttttcgtagtagagaaggtctccttgtttatcacgtattggcttaaatgctatataaataaatgggcctaatactgcaagaaagaaaaatccagcaatggtagctgacgaaccaataccagctcctgataacttacaaatccattgaataagcttaaaaactaaagctcctataataattccagcaccagtgatgctgatctgagtccaagaagcatatcctaagacttttttctgatcacccgaaaggttgactattaaaactcgtctaccttcacccataaaaactccttcccacatccaactagcattggacatattactaagagcgtttatttacgcttatctacctgccttgttgctaagaccgacaaccataccaacaagtgaacgaacgtgaataatgactacagcaccaacgataatgaagaagatacctacgatagcttcagttctgcttctaggatctcccatagcactaacaccgatcttaatcccacaaactacagcggaaatgattaagaggacggcacccaagttttgcaaaggtgcaacaaattcgttcataatcttagccaacacgtcaacagcattaccatgcgtatcaacgtgagttgagaatgctgatgagttatcactttcttcagcaaaaactggagttgaagttaaagccatagcttgagttgatgcaaaagcagccaacatactcagcaagaatcggatacgagttgcagaacttgcaaaaaaatccgtgattttggcaatcatatcttttactcccttccaacaaattcaagcaaaaatacaaaatgagccactaatgctagtcatacattagcggctcattataagcctgttaatcatcaaagaaatttaggagcttaattccatatttttgcttcacaaataatataaatgaaactctaaaaattatgttgtacttcaaataccactgataaaattaaaaaccatagtatttattgcgcaatatttttagcaaaagccatttcttcggtcttaattccgtttgctacttccttatctgtcaaaacttgcatccctacgttaccattaggatttttgataaaagaaccatcacgtgatactaataaatacacttttagattagaagtatccgtaaagtattttttagcaagccttaaaacacgttgttcaagttggggttctgctcttttaattaaggtcatttcaaaagcctcttttcttaaatatgtggtcgatttttattttaggcgtaattttaattaggtaaatcaattgaaaatttatgtaaaaaaactaagaaaaaagtgtagcaaaaaagacttaattcgttcccggatttaaaattgaagtgcaacactaagtgttaaacaaaaaggccatgaagacctaaacttgaagtgacgaaaaatcaagaaaggaagatctttatgaccaattcaaattctagcatttctaagcactatcatcaattaaccagcgtacaacgtggacaaattcaagcaatgctggattccggcataacttcccgtactgttatcgctcaagaagtcggctgccataagtcgacaatcagtcgcgaaatcaaacgcggaagtgtcctgcaaagagacagcagctatttattgtatgagcactattacgctgatactgcacagatttattatgagaagcgtcgcaaaaactgctatcagcgcaatccattgaagcattatgctgtctttttgagaatgctctccagacgctttaaagctaaatttgatgccaccagcatcgatgagttcgttggtgaattcaaaaggactatgccaggctacccttgtcccagcacaccaaccgtctatcgctatattgatcagggcttgctggacataagcaatattgatctgcctatgaagctcaaaagacgcaggaacaagcgtcatcacagccatggcggtcacgctttgcacaagaagcatcttggcaattccattgaacagcgtcctaaggaggttgaagacagaaaagctccgctgcactgggaaggagatctggttaaaggcgtcagacgcaagaatcagcctgctttaatgactttgactgaaagaaccacacgctttgaagtagttatcaagattcctgactatcgggcaagcacatgccaaaggctgcttcaaaaggagattgacagacatcctgcctggtttaaatcaatcacgtttgacaatggctctgagtttgcggatatgaccaagatcaagggctgccagatttactttgctcacccatattctccatgggaaaggggcaccaatgagaactgcaatggtcttttgcgtcaattcttccctaagggcaagagcatgaaagacaagtcaaaagcttatgttcaacaggcaactgatgccattaaccacaaatatcgccgaatcctccaatatcacacagcagaggaactcttcaagcaatatatctcttcataacctaactgttgcacttaatttgacaattcaggaacttaattcgtttaaaatcaagtctttaatttttatttttctattggtgaaatgtccataattttacgaatgtttatcagatgtcgctgcttagagtacttttgatttttatatgctgaaatgaactgtttattgttactaagcaaataagcctgagcctgatcataatttttaaattgatctgtatataatatctctccgtccgaggtcttaatcaataaaatgcatttctctgtaagctgaccttgaatttctgaccttagcttatgtttagcttttatctgaatatttttaggtttattgagatgcttctcaatatttaaggaattacacttaaaacgtcctttcacaatttcaataccctgtttatcaagcaagtactctccatcattacttaattgatagtgacctatgattggagtactttgatgagttgcaatgttaagataattacttatttcttctggagtaactccaactagtaatctcgctaccaatctaacaggcatatattcttgaatcctctgatttggcacgctttttgtttttgattctacctttatattcttaagtgaaagttgctcagctcgttgtcgtttagttgttttattccttttaagtgcctgtgaaatcgttttgattgcaaaactgtctaagaaaataaaactgcgcttgtaataataatgctggtcaataagattacgatgatttcgcatccaagtaactatttgatttctaataacagaaaaatcttttgtatttgccaacttgttggcaagtaccgcatgagaagtccacatcaattttttcatttctaattcagtcaatacttgatccatattaggcaatgggttattttctttattaatgtaaccaatagataccttaggtaagtagtgtttgataatttttataaagccaccacgagtagttgcccaaggatgcctagctatattaagattacgtgaatacccaatatgtaatgattttaaacttgcaaagatatcagcttctaattgtgctaaatcttcttgatttgggtctcccgtagcataataaataagttgagcaatatcatcaagtttaaatgccttataaccccacgagcaaattgcaccatatgcagtaattgctcctaggtcatggtaggtataatgttctgaaggatatcctaaaatcttgctccattgcttaatcatagatggctttgctttgatttctacatctaattgattcagcctttcttgtactggctgaattgcgcttatgctatcataatattttggttttgctatgttccattggcatttttttattacattttctaatttttcaataatttcagcattatataaaggtctggtaaagtagttcttgccagtcttaatttttaattgttttactggccttgctttcaaaaaagtatcaagtatagtcataatattgccagtagtaagtcgatggtaatatctactgtcaattaaatcttgatttacttgttgcgttatttgacctaacgaaagagtcgcaattatcttacttttagctggaactactgatgctttgctccttttagcttttgttttacgggatggattatatttattttcattactttttttagcaaatgcattagataatgtcggtgcaggtttaacttttcttttttgggggtttggctgaatatttttgcccgattgatgttgatttaaccatgtttttcttacgtaatttctacctaaaataacgattttagaaacttcaccatgatactctactatagcttgctgaacatctttggtatcagcagaaatatatatcgtcttgactagtctgcttaaactttcacgcagatcaaataaactaatttgaaaccccgtttttcttattcccgttaaatctacattctgtcttaagtattctgaaagcatgttcctatctgtatgaaggtagactgataattcttttaaagaataaccagtagtaggggctttatgcattaagtcaataacctgtctaaatttctcttgcctttttagctcatcataatcataaattggattattattttccattccactattcttaaaacctatgtagcgcattacttctgataattttgttgggtctaccttttgatcataggcaatcatattagccgtcattaagctatttgtcgagtcccacactagttctagtttagaaataccagcaagcttacgccattcatcaaactgaatcatttcaggtgagtgattcaaattaatgtaatcaacataaccatatcgtaatgaagcttttaagggcaaatttaatgtaattccagtattcttaactaatttagggttaactataccaaacaatttacaaatcttatttgaagaaacaatttgtagtttagctgagaatgaaataatagcattcttatgaattatcttgcctatttgttgtaatggtaaatggacatcagtgctatctgtataaattggttcataattagtttcattttttaaatcagttaccactacgtaagaacgaataatgccatgcgcacaggtattaactagttttttagctctagcttcaacaattatggacttaatttctacacttggtctcaactctttctttggaatgtccttgtctttatatggcataatttcatttaaatatctatctccaacgtgttcataaatgcttggttttacagtcatagtaaagctgctagcatccgtattaagtactgactccttcttttcaagtgcagaacgttttaaacatagtacccaatcacctttacgatcatagtcactctgtagttgtttttctgaatttttaccactaactcctaataaaccactattaactatttctgtatcacctaaagtgtaacaattattttgtttatcgaattttatttcactacgtcctaccaagacttcacctatactggcatataattttgcaaaagaaaataaactaatattctgacatcttagccaaacgtgactagcaaataacttaaattcattctgattatatagtgtacacaaatttcctattaaaatatatgattcttgcgaactgacaattttagaatcaagtactattcccatccaactaatacaattatctttatctttttctgtatttagtaaaagattatgaggtttagcttccagcaaattatccttaatctgatagaaattttttctacgtaagttattaagtatttctgctcgctttcgaggattattcatgtctttttctggtacttctacttcggtatttttattttcactttttttctcaatttgatgttgtaattgcatcaatttctttaaattctttttagctattctcatactttaatcacccttcttacagccaatagccacataaacgacctaaatcgtgccaaaagctgttagtataacgttttcggagtggctcgtgtactggaatatatctatgcaatacttcagagtatttttcattattcttatcttgggcttccacccttaccaaaattccaattcctaaatcagtatcgtcacctatcaatagcttttccttgttttcattacctaatttcaagaagcgttcccaaaaataattggcgtgaatttacacgtaaaattatagtgccaatacaggtaaatactagtcttaatcaccctatttggcgtaaagatatattaagccaaaattattttaatttactcaagcaagcccatgtagacactaataagtattatgatgtttttaccaagtttatgggagctacaaatgagtttgatttttatcaaaaacatcccgatacaattagcacgattaataagattaatcctaaaaataatgatctaaacgatttaggaaatcaaacattaattatgcctaactactttattccccctttgcatttcaattatagtttcgacatttatgatacattttatggcaatttcgacatgctaacaaaatcatataaagacacagctaaacaactcggtactgtagctgttccagaaatcaataatttatttaaacaaattattgacataaatatagataatcaaatcaacgatacattaaatttactagctgctagtctcggtactaatttttatccaacattatgtgatacattgaaattttatcctgagcttttacctacacttagtcacaatcatcaaggaagcaattgtattaatatgttcaatctcatttatggtaaaaaaagttcttttcctcgtcacgacttgttgctcctgggatgcaagaactggcggagcatctatgactttgaagaagtaactcctgaatttcaggttccctgttacaaaaattaattagtttaaaccagtaaacgcaaaaagattttggagaaactatgaaataagtgtctgagaaaaatcagaaattaataaatcctactaaatcttggtattaaactttgatttaataggatttttcttttaattgaaagtctaaaattaactaaaaaagacttttttacagacacttactttaagtatgatttaaaaaagttattcttgactcaaatattttttattaacattccaaatttcaagttgttgcttcttaagatttaattctttaattttcattgccaaatcatataattgttcagcaacattagtacattcattggcatacaaatactttgattttactgtttgatctagttcgtctgataatcttgctatttcttgcctaatacttttttctgataattccaagttttcttcatctagacctattatttttttcaaagtatcttctttattcatttggttttagcctcattttcttatcctttttcatccaagttaaatatcacaatatcccttaaagggctccaattgcacatacaattaaaatcacccaaaagataaacaatgttgtatgccaatctttaggaaatggaatcatataactcggattgccgtttccataaataatacctaaccaccataaaggatccctataatgtctcataaatatcacccttaacctttcattttcattctagcaaaataaagcatgataaaacgaaagttataaggttttaattgactaagttttctcttaattcaaaattgtgccaagcattagccacattactaaagctatactttctaaccaccgaatatgcattcttagaataatcagctaaaatagcgggatgacttaataaagcatccaaagtttgaaccaattgcacttcattaccagcttgtactaacttaccagtataattatccgttattatttctttaggcccataattaacattataagcaactgctgggcaaccatgctcttgtgcctctaataaagccatagcaaatccttcatatttactagtaagaatttctaaccatgcattgttataaacattatccaaattatttaaaaagccagcaaaatgaatataattctgtgcatgattttgaataactaaattgtgtaacgaaggaccagttactttatcagtggtactttgctcatatccataaaaggtcaaattgagttgaggatatttaggcttaagcttgatcacagctcgaataatgtgatctaatcgtttttcttcacttaatctagcaacagcgattaaattgtaaggcgttctatttgcaaatgagactggtttaatattgtcactagcataagtaactggaattgcataactatgattagtcttaaaaatattagcaacatcatctgcttcttgattagttgatgaaattaaaccattcaaacttccttgatttaacatgtcagaaatactttcatacataccaaaaagtcgtccattgcgttgaccatcaactgtaaccgaagagtgaaaaattaaatagcgtggtacaatttgcctcatttgctgaaattcatacagagtgcgctctgatctatctgcaaaaaatacagcctttaaatcattttgagctaattcatcaaaaaaataagctctgaaagccgtgattgaatcaaaattatgccaaacatctcgataatataattgaattagggtaagaattggactattaccttcaccgccacgataatgcattaatataattggcttgctattatcgttataatattgtgtcaaaaccaatctccctttatcttcatagaaatcagtaaatgaaaggcaaccctgatcataataatccgttcgatctaaaaagccgtaacgatcataataatcaattgaatataagcgattatataaaaagccaatttttagccttaacttattgtccttataagctgcattgtttcgtaactcatagcctgacatctgagttatttgattaataattacacgatcaattacaggatcatcttgataattcaaattttgaaagtattgataaagattaattactttgccttccgtgcctaaatttctttgggcataagcatgagcattgttgtactcagtttctacgattttagcgttttgaccattcgcattaaataatttaattcgtttagcttgtgcaatttcaattgcggacggcattgggtcctccatactagtaataaaataattcgccatactttcccctccgtttaccttgctaaaaatatagtagaggcaaacataaaactatagcaaaatgcaaatataaaagttttttaactagtttttgtcaggattgcattattcataattatcaaagcatcccaaaacaaaaaagcattatctagtctcaaaattaatgactagataatgcatagttaagaatcaatttaagatatttatttaatcaatatttttctttttataaaatgattttactcgcttagttttcagcttattaacattcatactttttgattctagtgaattattcaaatgatactgaacttctttaagactgggtaaagtacttatcatacgatctaatgctatatcttcctgttcctttgtagtagctcgatagaaacgcattaaactgagcatgaactctgcatgttcgatattatcaaaaggtaaggttagataatcctttgaattccaagtattaagagctgcattttcagcaattaaagctgtccttttatttccgtcttgaaatggttgtaatttagatagttctgcaaatactctccaagcatccttagcagattgcttagatctcttaaattcatctactatgctatctaaatcttccggataaacattttcaggggcgtaatatgctcctttaactgtgccattgggatctgttactattaaaactgcatcatcaggatcaaagctagcttttcttaaatgacctggaatattagggtcttcatttttgctatgaacaaaagtcttattaatttcaataatacttttcgttgaaaagcccatttcttgagcaactgctattccatctaacgcatccttcaatattccaccgtcatgatgctgatgttcaagcttagataagtcatgaaaatccaaagcaagcttagtttgtaaaatagtactactataactattcatgctgccaaaagatactataaaatttgctaagcctaaattatcgttcatcttatctctaccttctcccctttttgattaactacaattctaacatcttttaatctaaatcaattacaaaaagctaagcactaatttcgcctaccttaactttttctagttgcttctttagatcaggaaaaagcttatcaaagtagataactacttgggacatagccgctttccgaataacattgtattcagtatgctcataatacttacgcattgttgtaagtgaaggctctgatactgcattaaataaatataattctaagcttctagcaaatacttctgttggaattaataatttgctttgctcattttttatattcgatttaacaacataagaacttacagcttgcaggatgggactaaaatcagacgacatgcttaatgtagtatttgaagtagataagtactgataatctaagaaatgaccatattcatgtacaaaagtattggctccttcttcgtatttaccatttgatatttgctttctccgtggatctaatactatttggttagtcgaaacaagatatactcctaatttcttaggcaatttcttaaatttcaatactggttgcttattagtctggggtaataaatgaatccaagtatcaattttcttttctgcttgatgaaaacattccaattcaaaattatcatcaatgcatagctctgaaaaatctttctgcaacggactactatacatagcgttaattagtggcacttgtagatttgtgtgcttatgccagcgcttactacgtgttagtaccacaagattattttcatgtttttgcattaaaatctcagaataatttctacttaaatacattttgataaagtccttagtctttattccatcattaaatccactaaagggatgccctgtacttttagcatatgattcagctaaagcaaaagcactatcattaatccaacttgtatcttcaacaaaatgttctaacgacatgtaacttgttgtacgcttaccactaagcaaaccttcaatcgttctaaaaaacgtttgttgctcgatgccatggttattcttctgatattctgcaattaagttcttcactaatttgctaaatccaagtagcatcccttttgaaatataagtgaaatcgtagtgcttacctttataagaataaatagttccactagtttccagcttcaaatgatcattagtcaaaaccaagtagtgacttctaccattataagtatgtaaaataatcttaattgcataattataggtagaataacgccctgctagtaaacctaatttatgaatttcttccttgtcaacgtttttactatctttagcccactccttttctaaaggattaggacatttgctacctttttcaaaacctaaaaatgggaacaggtatgtagcagcgtttaagtaatcactccacgtccattcacaattttggtaaatgaaataagcagttttacgaaaagaatcccataatttatctgtaggtgaagcgtctagtattttcaaatttttcagtttgtttataccaaactttttatgaactaacgagttatccattagtccatgatctggtacaatcctatcaaaactaaacaattctaattgttgatcttgcatttttccttctcctttttcttacataaacaaaaaaacactgtctgaactacaaacagtgtctttagatatttttaaatttcttactaaatgagctgggcgcttatttcactactaatttgattgaaataattcatttcgctagttagaattgcggaatatttttctttatcaaaaatagttggcttttgctcccttattttatttagctcgacttccatattaaagttgtcaatctgtgactttagtcccttcagcattgctttattagcatttccattcataatttgctttttaaataaagttaccgtgaaattgatcaagccattttttctggcaaatcttagctgaatgaaaagtattctattcaaaccatgctcatcaaaataagtcacatgagttggataaaatttgaccataccataatgctttaagcaagaattataataagtaactacttcttgctcctctaattgagatatagttgccatttcaagcttgttattcaatgcacccttcaaactctctctagcttctggatattgttcaaccaaagaaaatagctgagctaccttaattaaagaatcctcatcataatgcagtctttttagctgatcattagtatgaatattatattgctgaacaaaattctcattatgagcttcttgctcttgtaagaaccctacttgtgacacaatttccttagctaactttttcaatactactgattgaattgcaacagcatcagtgttaacaaaaaaggtcgctgaatcaagcattatctttaactgtaacttatatggtgcaattaaataaaaagctaatttaggtactcctttacttgttacatctttccaatcccatttacatgagacaggtacatatgcagtacaaatcttgtttatcgtattaagcatcgtaattaagatttggggattagaatgagtttctttctctgcccaaagtgaatcatgcacctcttctttttcagtatgaacaacataatcactcgtagtattatttgcatttgaagaaaaatgattcttttggaaattcttagtttcttcatcaattacttcacaagtacctatgaatgaatcctttaaatcttgcttggcttgatctaaaaaattaaataaatctgacatattttacctccattacttaatagaaaaaaacctagaattacactacatgaatgaaaatccagaatctttttaactaacaaaatacaaatttaactctatgactaacaaagtgtcacttaacaaaaaagatgccaataagctttacaacctaattgacacctcaacataaacaataaaaacaaaatttgacaattaacaataaaacaaatcctactttggatttattaaacaacttaacgaaactgtcaaatcttttgtgtaaatagttctttctcgtaaattgattttttaatcatttatttaatcaaaataggattctaaggtatcctgaacctgaccaaagcctttatgaattcggtcgaaatagcggtcattgtagctcattgcctggatgccaataaatacatcaagcgactgttcagttggaaattctgccttaggcttagctttacgcttgatgacgttgttaaaggattcaatcatgttggttgaataaattgaagctctgatttgtttgggataattgtagaagaccagcagatcgggctcaatttccctcaaacctttgataacatggctataagctttattccattttgcataaaattcatgcaagacagctgcagcttctttttggcttgtctgttgatgtatctgcttgaattcgttcatgatcttttcgcggtcatccacccggactttagcacagatattgcgcatgacatgaaccaggcagcgttgaaaatgagctttaggataagtcctggccaaggctgttttcatgccaacaacaccatcagaaagaaagagttcaacttgcttcaagcctctggacttcatgttttgaagcatctctgtccagacttcaatgttctcactaggagcaatgcagtagtcaatgacttccttatgtccattaggtttaatgccaatggcaatatagactgcttcacgctcaaacgtttctcggcgcaaaggaaggtatgtcgcatccaaatagacacagaaaaacttgtcgcttagcttgcgcttgtgataagcctcaaccttggggagcatctgcttggaaatatttgatacttgagctggactataatgactgccatacattttctcaatcaagtcagcgatttctctggtagttacgcctttggagtagagcttgataatcatgctttccaagatatccgagtgctgcttgtagtcaggcagcgtgtgctgatgaaactggccgttgcgatctcgaggcacttgcacttcaattggtccaaactgggtatcaaccttgcggaaataagcaccatttctagaattgccagtattccagccatttctggcatagggatcatagcccagaaaggcagtcaattcagcttctagcaagttattaacagcctgttgtagctctttgcgcaataaatcgtttattttgtcttgattgaatagagcttgtgctatattttttgtaaaatcattcatgaaggagttcttctttctgtatgtgtttttttgttcaaaccaatcatacgagaaaggaactcctttttctaatgttttaagaaataaatttaaggaattattcatccttacacaaaatattttacagtctcaacttaactcacatgagttaatcaaaaaatcaaaaataaaaataatcaagtaattatttttacaatgatagtttaacatgattcagttcttatctgcattcaagaatattttgacgcaataaacaaaaaaagatcagaatttccgaaattaggagattctggtctttaattttgctttttaatattgttcttcatctaatgcagaatcaattacttgattgagattagtttctttatttatccctacctttttattaaccacttcaaagtcctttttacatggatttagatagtagcccactttagcaagataagtcttaaacaaaaattcagatgcattagcatccctacctttaagcaattgttcttggatttgtttatcttggtctaaatcagtgttcaatgtttcagcaaagctctcaatgtctttacctactagttgaggtaatttgcccaatttaggatcataagcataaatatcctgcttttgattccattcaagcccaggaatgatttttctttttctgaggattaacttatcagagttattctttatcactgctacggcatgtaacaatgtatccggataagtatcacacatagcttcttctgatgaaggcagcttggtcaaattcagcaatctatctgataactctttacctgcaacaatcaatttctcaggtaaattagaatgctttaaatcagctattgcttccatattgtaacgatcaagagggaaaattgtcagctctaaatccatcgtaaattcattattgatggctaaggcataccgtcctcctcttttttgactatttctaatcattttcttgatgttctgatcttcagcaaaatcttcgtcacttaagtctaccttatcaaaatcaatgtaatcagcactaaaatatttcattttaggcaatgctacttcactgatagcattagcttgctcgacctgtatatacattttgtcctgtgggcaaatgtccttagtcttaattttacctttcataattgaatcttttagcatatttacacctttcctttacttatcacttgcaagaactacagcttgttcaagcttatgttccgcatctttcataactacctgctcgtaaaatttattaatgatgcaatacaatttactgtttaagtatggatcagcaaattgagctggatctgctggattttgacctctcactaaacgagacatataatctgaaaatttagtatgcgtatcataatatccagttttaccgcagctgacttcatcatttaactcactaatgtcattaatggttaaactaatattctttagcttttgtttcttaagatcagagtacagcttatcgacctttttcttaatgtacggcttaactaattgggatgcatttttcgcatctaattcccaatcttgtagaactaaaccatttttatctgcattttcttgtgctttttggtcttggcaaagagcaactaaatagttgaatccaacatttcgaggatcttccttcaatttagtacgataaaagttgctaatttcgtcctttatttcattcatttgctctaacttaggcaagtcatcgtgcttataaagtggtaacttatgactaagttgcttagaaacactatgacgtatctgcaataaaacagaatggacaaaattcaaagtaacatcgtcactcgacatctgtatacttattgggaactcttcaaaacttactggatcatagaagttaacttttacttctccgtaagtattatcgtaaaatggttcaacttcatcagtctggccttcatcgccaagatgatattcctgacctaatgtctttaagaactcaatgattaaactcttcttttgttcgaattgtttgtcccaaaattcatcattatcgagttcagctaaatttaatgcttgaccattaaattttcctattgagttaatatcatcaatcaatgggtggaaaccatcgtttaaaactagattccattgcggcttattatttgaattgtagccttgaaaataattaaattctgagccattatctttaagaaaattcagatattgtgggatatttttaaaagtattaattcttagttcttcaccacgatcacgatgataagcagatacgtgtaatctgttatcatcatacagacgcttctgctcatcctgcggtagttttttaaaactatcatttaatgtagcattccagccatatcttaagacaagttcacttggatctagactttgaccgataacttcaagctcacctaaattaatcaacttgcgagctttatcgaaagtttgatagtggttaactaagattcgacctgtgtaagctaaatagccgtctgcataaccataaatcataccgatttttccgttttttaaaattgttgcaatagtaaatcctgtagtcataatcaacttctcctttatttttttaaaagaaaaaagcatcaaaaatgcttttcaaactctaatatttttaacaattagtttctaggacttatgcaataccagataaatggttgtccatccatatcaaagatagtgcatgaatcgtagttaagcctacaatgcttttctatgtctactttctcataagcagccacagtatcctcatctgcaaacttctctcgaatgatatattcggagctgtcttccattttgcattttgcatcccaatgactatcgaatagtttagaatcagtggattccattccactaggcaaaatctcacggtaagttaaaatccatttacccttcttaacattttgattcaatttgatttctttggttttactcataataattaattacctttcaaaatattctagttatatttctttaaaatcaatttcaattccttttactaaagcatcatcaatacctttagctttagataaatcccaattagcaaagcgtactttgtaaccatgttgctttaacatctttagcaacttacgataattatccttaacttgttgattttcttgaaaatccatgtcatatgcagtagtaaccgaagttacattaagcttcttaagcattggcaaaaaatgtgagtactgacttacaccaccaactgctaaaaagtctctgccaataacatcaagctgctgttgattgaaccgcataggtaaataatcagtagcgataattgctttcaagccaccttctgttaaccaaattgctttaggcttcttagagtaagccttaatttgatcaagctcagttgttttaccagtattagaatcaactttagtaggatctaatcgagcgatctctggattatacacgacagaaacaggtgattgacttttagccccatctttttgcttagcagatgatacccaaaagtatttaccgcctttttgaattttaaattcgtatttcatgccagcataatccaaatttactacatcctgatctacaggaacttcaccttcagcaattacagtagcctctttcttcccaatggcagagtaaagtaagactttatacttacgtgtgtagctattaaagtctacttttagcttgccaccaagtactgatgaattgatgatctctgctgtttctctaacatgatcaacacgtgactgcataccaataatttgattatattcattgtaaaatggcactagcattccaaaaaccttaggagcaaatttaggtatttgataagttttaccgttgtatgggtattcaacattataaaaacctggtactccaaaccaataatcatgcgtgaatttaggattaccggtttctgtttttagattatccaacataccattccataaactaataatctttactggacggccatctctgctaggctcaatcttagcttggctaaagtagtcgacaacatttccatctttatcttttttagtcggataatacgtaccaaaagcacgcttaccacgaagattaatcatttcatcagtcatgcctcttttatgcaggttctcacgatgcttatcgcataatggatagcacagcataacagcacgatagaacatatccaggatctcaggcttagccttagggtgtgtaattagcggtttctgcttacttacatcgaaagacactttaaagttcttatctaggtaatacatataaccgccagtagctcgaaatggatggttattggtctgtctttggcacactactttggtaccagtaacattaatcatgcaccagtgagtaccaccacagatagggcaatgggcaccatagaattccagccaataaacgggatgctggggatctttgtaatccgtatcaatcatgtccgtttctcttaaagcaccaccaagtttttcttcaagctcagcatacttactttgtaaattttgcataacaataattcctcccaattaaataattagtaatctacttttcttggcttagttagatgatgaagccagctatgaaagccaacttgttgtgcactaagcgtatgtttacaaataacttctgtcccatccgaattagtcagacagtcatctttactaccacaaagtggacagcgagaaagtagaaaccaagtttgttcctcttctcttcttttccgcccataagacgttagggctttatgatcatttgattcttctgaatgtttaaacaatacttgtttagacaacatagcaactccttaattaacaaaacaaaaagtgtctgggaaaaaactaagtctcagatcatgaaaaaagaacgttgaatttttgtttcaacgctctttttgtatacttttagctccagccttgatattattaaatcatcacaaaataaaaaaggtggaaactaacatgtacaagaattatatcacaggtcaaactgctttaacacttaatctagattttgccattccggccaatcatttggctaatgtcatcagctggtttgtagattcaattccagaagatgttttagtaggcaagactgctaaaacgggccgcccagcctatcatccagccatgatgctcaaaatactgctttttgcttactccagaagagttttttctggcagaaagattgagttgatgctggaagaaaatctgccaatgatgatcttggctgaccagcaaaagatttcatatcatactatcaataattttagatcaagcagccatgccaatgaactgattaaaaagagctttatctacttcactaacctgttagaagatgaaggcttaatcaatgaaggtgctgcttttatcgatggtactaagattgaagctgatgctaaccgctatacatttgtctggcgcaaagcggttgaaaagtatcatgaaaagctgaaaggccaggcagttgaactttatgatgaattgattactaaagaagtagtcaaagaaatggaaaaagaaaaagttcaaactagtcaggggctaaaggaattagctcaagaaactgaagcagaaattaacaagctgactaaagagattgagcaggaaaacaaagccattcctggcggttcacctcgaaaagccaagcgacgtggactaaaaaagattctgcaccggctaagaaaagattatgtgccaagaatgcaaaaatatgaagaagccgaagagatctttgccggacgcaacagttattccaaaacagatcatgacgccacctttatgcatatgaaggaagaccacatgaaaaatggtcaattaaagcctggctacaatattcaagcagtcacgaccgatcaatatgtagttgattatgccatctttcctaatccgacagatttcaaaactttggagccggttttggatcaaatgaccgtgttggacaagtttgacaaaatcgtcgccgatgctggctatggcagtgaatacaattattcgatgctggaggaaaaatatccagacaagaagtactttattccctacactatgtatgaaaaagaacagaccaaaaagtataagaatgatccaactaagctaatcaactggtactacaatgaaaaagatgattattacattgatcatcatggcgtcagattcaatttcaaatattacagccagcgcaaggatcgttctactggtcaggtccgtgattttaaggtttatgaggcagacgagttccagctaacgccagaattggaacaattggctaaaacagctagcggccgccagcgccaagttcgctataatcctaactggcaatatttaaaagaaaaagcaaaagaagttctccaaagcgaagaaggcagacacatctatggcatgagaaaatatgatgtagagccagttttcggacatttgaagaacgtatttggcatgcgcagaacgcacctgcgaggtaaagagaaggtcgaaaccgatatcggaattgcctttatgatgatgaatttgaacaaatattgtcaaagaaggtggctgaagggccgatttttattgttaaaaattttaaagagaacaaaaaaacgatcaagattcttaaaaaaggaaatcttgatcgtttttattcatctggaagctatttttttcccagacactttaatttactatttgaattgaacaataatttaatcgtaaaacgattagataaacaataactcagctaaacaactagcttacaaccaaattatcaccaacaatggcaataacgttaatcaaaatgaattaatcaatattcatttcaattatgattataacatgtttaactcaatgtcataggaaactactattaaagccaaatcttcaataagcaaattactacaattacaccaataataactgctggccaaaagataatctgctttaaactaagactactataaattttagcggacttaggttgggatttaacaactttatagcgaacatgcttctgtgaaatcttaggagagactttattagtcaattccgtattttctaaattctttttagtagctggcatactacctataaattcaccaactgctaccgttctatgttgaccatagccatattgattaacgttgaaatcagaacaagtaataagagtaactgttttcttaccagggatgttattctcaacttctacttgcttaggagtaatgtcatagcgcatattagtttcaacatactcatagattctatgcatgtctgtaaaatagattttatctccggctcgtgttaaatgtagattatctaaaacggcagggccataatttcccatataatggccggcaaccacataattatttgttccacccattactctattaggaactaccgtacaaacgccataggacaaattctgcaattgagcgccatagccttgaaacaatgggttatgaatatctgcggctggaattgacattcggccaattgctccagccggagttttacgtgcatcccataactggcgagtatctacatctgttgttttagatgcatcataagtagtctttaccttacgatttttatcagcttgttttgctgttagattctcagatgctcgctccccattatcacgcaacatgtaagctctccctactttgctgttaaagaagaacagagacaaaccagctaccagcaagatagtgcctacaatcacataaagcgaatcaaatattttggtactaacgctttttcttttcttttgctttctcattgaactttgtgccctttctatgagaatcttctatatgactatttggcttttcagaatcttgcttatctttctccttcattaaccatttagcagaattaggatgagctgcaatgtaatctaatttatacttatctgaaaatgaccaaatcatacgaattaaccaaatcataccaatagaaacgattacgatggcaaaagctaatatggcggccaaaagctcaaagagccactgtttagtaaaatcccaataaaagaaaaatactaaaatacaagcgccttgaattaacagcataatttgttgactggttcttaacataaaatcccactcatgtgagtataatttctgtttgaatttttgctttaacttcattttgctttctttactcactgttcactagttctaatttccaaatagccatttaaatgtaaatgcaccgcacattatcaagcccataattaaaccagcgccaaacataattaagccattagttacgatggcaacaaaaagctttttttcttttttcatggtgcgatcacctcggtgaataaaacagctagtcctgaaccaacaattacccaaagcattgttgtatatgctgtcctagcttttcgtttataggtttcttggcctgtcattgtataaacttgtaaataaactgtaccaaaagcataaagaattattgatccggacattgaaacaaactgaccaataagcattactgcaaaagctgttagacggccaccagataaattgggcgaagatgccatagctataacaaataaatgtataaacataagaaagccatagatactaactaaaacacctacacccttccgccgtgcttcacctgagttaccaatatttgaataaatcatatagcccataccaattaaaagcatgagaactaggataacatcaccaattctgattaattcaccccagacctgtgagaaaccggtattaagaatatgaaagccgttactacctttttcactaaagtaattatttaattgcgagttattctgatcttttacatattggccaatatcatctgccagccaaatgaaattatccaacttacttcaccatcttcatgaacttatcatgactaagaaaatatccattatgatcgcttaaatcaaaataatgaataaccttaccgtcagtatcagcatttcttagtggcatagctattgcagaattttctgtttttactgctaatggctctaaatcaagtcttagcatttctgtctttttctcttctttctccataacaatatgtttaatcctagccttaccgttactttgctttgctacggattgaaccattgcaacgatctgatctttaggtaaacaagaattgaaattatgtgttaaggagtactggtcaaagttaactacccactgatttttaaatggatttaaagtcacaactatattttgcaaccaagcttcagataattgtgataatgaataattggaaacaatatgattgaaaacattctgccaagtaatcacagaatcttcagtactcatattcacaaaattcttaacaggaacgttcttatcttggggtgcagttaatccaaacttacatttaaattgatgattatgtgtcataaataactccaagctatctatctgagccaaactcgttgtcgccaaaataggtacagtttgacttaacacatgatcaatttgttcaatttcaaagtgatcttttttgtcactatgatatattaagctctctgatggataaatcatgccatgcttaaagagcaagcgattacgtttacttaagtcaaaaaataacctagcactggcttgatgagaattctcaggattctcatagagcttaattatgcccatcagacttactaatatttctgactcaaagggatcttgataagaatcatattggtcattggaagaataatcagaaataatttgaattgatcttagccgatgacggaacaattgaattgataaaccagttgctggtctttcaataatctcgcttcgttcagcttccatagtttgattcaagattgaactaagcaaattatcattagaaatagcatatttaacattattcgccttaaatcgacaagtaactttaatgctgtcataaacaatacccagcatatcaatatcagcatcaataattatacgagacaaaaatactttctgatatgtcattaaatatgacgaaatcatattagaaagaataaaactaattgagctagttaaatctgaagttatttcagtcgtaggaacatcacttgaaaaagtaccttcgatgaacgaattttcatcaaagacattataaacaagcttaatatgtactggagcgtgtttagtctccgaaatatatctttttaatgcagacaaagcaagtggaattgatttaagctttgttgcaaattggttacataccatttattaaacacatccttatatgtgtagaaaaaaagagacgttattcaaaatcaatgtcattaagttaagacattgacaaattatcgacttggacttttaagatcattcatttgcgatttatcgcatttgaatgctcttttttcatgccaaataaacccaaatcttgtttagaaattaggctacacgatataaataatatacagctgatttgggtttgagatttcttttgtcttttcgtcctggtctgatcggaattgtgtaatgactaatttgaataagaatctttttaaagatttcagttgaagaagaaattatatacatagcctggatgacaaaacatgactgtttgaaattgatcgcatattgatacttgcattttttttgtggtacatatgcttgagcatcaatttgactgactgcgttaaacataatcatgtgggcatagatctccatttcaataaatctatcctgcttggaatgaaactgtacgctacctaaagcatatttcaactttttgaatgaagtttcaatgccccagcgcaaatggtagatttctttgatcctttttaagggataatcggctctatttagattagttagaacaacttcccattcttctttgcctgatttaggatcattaattctaaatttacaggcacgaaattttattgtacataactctccaaagtcccagctgccatctttggtatttttagaccgatattttatatattgacggtaatgatggttaaccaaatgaacgttttctgtagccttatgggtttcataataataattagaggtagtcacccagcaagctatatccttatcacactcttgattaggcaactcagctacttccttaaatgcgccatatcccgttttagtacgtatgacataataacagttaggcaggcgattacaattttcaatcatgttaaagccggtataacctcgatccatagtaactatatatggtccgcaatttagctttttaagcatttgaacggcggctttacgttcatccatctttgacttaggctgaaagatgcagtcttgataagtattatttaacaggtcatagagtgcattaacatgaatttggcaatatggctttcctttatgattgagatttccaacgatattctctgatttaggattccagatttgattaaaatcagacccatcaatggcaaatatacgatatttatgatcaaataactggatattaaataaattctgattaaatacagttagaatatgcttaaaacatgcgggtgaaagctgacctttgcgttggacataagcggaagtactgactactttatcgttatttttaatagctttttggccaaaagctctaaacaactcactggtcaaatcttttccttgcatattaatagtagttttaatgactgtagctgcatctaaaaaccgcttcctagtgaaggcatgaggatcatcgataaaatcatgaatatgctttccagtatcattgataatttgatcaagacgatctaaaatatttctgtgaagggctttcataattaacaccagctttctggcaataattttgaaggtttaataatttaatcagagggcgaaaaggtaggttcttttcgcctttattttatgcaaaaaaagaaccaaatcataatgattcggttctacagagattagattcaatttgtcaatgtcttaacttaatgacattgtattcaaaataacgtctctttataaaaatagattatagttaattatgacttctcacttgagcttctttccatattttgaaagcttttggcccacgttcggcaagaatgtcatacttatcatctttccaggtcggaaaatgatttttcttaaatcgctgccactcggaattattgatgttgaaatacttgcgaatctgagaatcggaaaagtcttctgattgaagcaagatgtagacccattcataataaccaccttttggattacgaatgtccgttttatttttaaaccaataactaatggaaccctgttcactgaacaataccttgtagttatgtgcatctttgcccgacacaccagcgacttctctattttcgctttctcttattgccctctcacgacaacgtaatacggaacatagagcgcaaccgaccaagcactttttcttatgttcagcaaaagtttcatcgccaaatacacgcgtctgaagcaaattgcgttccatcgctgctgatggtaagtcataatgttctgtcgtcatatctcttttaccccttttttttacaaaagcgggtacttttctttgaaaaaaaacctaaaagaactcttattcagagttcattatcattttaatctcgagcagagtgactgtcaacttatatttttcataaagtcttaataaaagacacgttacttaacttccatgatttttttattatcatatcgaagttcaatatttttatatgtttttagtactttcaaactaccaaatttcatattaatttgagttggcgaatctgatgaaaccttggtaggttcaacatccttgggaatttcaatatcgccatcagtaccatccttatcaatgccaactaagctgtatttggttcgttctgatcttaaagcaaaaatatcatttaaatctacagtacatttaaaggtacgatccttaaaattaagtactggcttcgaccaatttatactacccttagcatactgattaggagtaagtgaaaatgctgtagaaatatcttttgcgtcagtaataactgattcaattggataatatgaatttttagtagaaaagaaattactacttgtaccagaatcatctgattgttttaatctcatagtaaacggagcttgtgtcatgctcggcttaccctctaatggcacagtaataatttcaaatttaccatgtggtaaacataaatagtaatttcgataagccggatcaacttgcaattcatcacctgtcttattgactaactcaatatctgaaaatggtattgcaatgtcagtatttgtctggttgtatgcctgcaaaataatattttgcgggtcttttttatttatcaagacccacatacgaaacttatcataatcagaatcttgaaactgatcttttaatgaaggaatatcttctccttgttgcttagcattatgaacctgctgcatatattgtttaatatcagtgtagtaatccccaacttgtttcatgttagtagtcagggcactcttagtcttttcttgatcaaatgaagcattcatagtagcggcttttctagtttttccattatccattgtgtaagtaagatgtactagccgtaactgcttcttagttaggtttgtaccaagataaaaagatagtgaatcattaaatgtagaacctgaatccaattgctcatgaaaatcagcggaagtattaggcacactaaacggtttaaaagtatgtccttgaatatgcaaagcaaagtttcgagatgaaaccacagttgaattagtacccgtatttctaagcaaaacaggcattgtaattaaccccgctgattgtgataattgcccctgacgtaatgatacatcgacagttggttgctgatgttcatcactaccactaacatcaggcgtagcttcttgactagcacaagcacttagaagcattggagcagatagcaatatgaaagatgcaattatttttttattaaatttcattttattgcctcaaaatatcaggaaaaatatactgacgtaggccaccagtcttacgatcaggtaaaaagaatgcttgtggaaggccttttctagtaatttctaatccaactaaaaataaagaaggaaatgcaaatttgctaagctgtaaaaactcattgatttgctgcgctctctcaatggtaggagcataaaaagccaacacattttgacctgccggcaaatcatttatctgcacactcagatcttggcccgctttagtaaatttattccactttatcgttgcatctttatagtaatttagattgtcattataaagagctggataaaatactaaattcttaggctttccctgcgttaactccaaattaatttgaagtgaagagggtaataatactttctttttatgtatatctccatggaacatagttgtacttgctctataagcaggtagacttactaggacttgataaacatccaatgtttcccaaaatcttaaatggtatctccaatttaaattaagaaaatcctgcggatgaaaataatttgaattagagtaaaaagtttttaaaaaacgatagccatttcctgtgagcgtataaacaggcacatctttaccatcaataggatgatgatatgtccatcgcataattaaaccattcctaaataatttatttagacaatgatctagatttagtccatcaagtaattgcggaaacattctagcttcacgtttaagttgtagcttttgaacactcttaaacatagcaataaactttaaccaatattcatcttcaaagtctagctgtgttaggacattattatattgatcagcaatttcatattgacgaatttgacggacagaatctcttaaatcaacataacctttaatatagaaattccgatgtatctcgaagtttttttcgtcttctgggttaattaaagaaggtaacattgcagtgccattctgtggattaataaactgactatctttaattggtacaggacgcatacttacctgtttcttatcatttatagtctgcgacatgaatttgcctcctttacagaattactgttcgtgaggatctggtacacgtacaactccgtgaggaaaccttttaatccatgctctaccggtatgtgtctgaggattaattttctctaaatgaacaattacgggagtatgctgtcgtgcatctgctactgacggcttaattggtgaattagcactcagaatacctttgcaccaccaacctggagctacttcaacaaaaatcccttgaattggatgataatgaacgatatagcctttgaaatcagctccccgttcaaacttactttctacatctttatcaggagattccaaaaatggtaatctggtagttaatacttgatacattaagcctttaggaacagctctccctgcagccatatcttgcttaacaccatcttgatcttcatatttagccttaatgatgttagtaattctaaatggaaacttcatgccaatataagctaccttgtttaatggcttagtccacgtttgataatagaaattcttggccaacattcctaattctgcaccttgatattcaaatgagataaaccgaaaatcaggggtatcaatgacctgcgtaactttaccgattctatcttgattcttaactgcttctggatctttaagcattgcttgataaagcagaccattaatcacaaattctgcttgttgaatggagccaagagcaatatattgttcattaccctctttgtcctttgtaccagcgtcaagaaaagtagtaatagcaatttttacacgctgatcaatgaaattatctgggtgacgataatttgaaccagcttgactagcaaagacataaacaggagcatcgttttcttctactcgcatttttagtaccggcattactagtccttttctaacttcaaagtcagctacttcttcaccaactgcccataataagttatctggagttaattcttgattaatttgtcgcttatattcagcaacaaaaccttgtaattcaaagggaattttttctgctgcatcgagaaaaaaaggaaccccttttttttcactatgcgtcaattgactttgattttgagccaaagtattcaatgcatcaaagttttcatctgccatatttctcacctttcatctaaatagttcactattcaccttactaatttgcgcagaaatatggtctaattgcatagaacaactcggttttaaaaaagttctgaaaaaactctattactttcgtttttaagcaaaatttttttgtaagatatacttgtcaattcgataaggaataaaaaaagttaatcaactttcgtcattagctatttttatgaaactgtcaaatcttttgtgtaaatagttctttctcgtaaattgattttttaattatttatttaatcaaagtaggattctaaggtgtcctgaacctgaccaaagcctttatgaattcgattgaaataacggtcattgtagctcattgcctgaataccaataaaagcatcaagcgactgttcagttggaaactctgccttaggcttagctttgcgcttgatcacattgttaaatgattcaatcatgttagtcgaataaattgaagctctgatctgcttgggatagttataaaagaccagcagatctggttctatgtctttcaagcttctgataacatggctgtaaaccttgccccatttggtatagaagtcatgcaggacagctgtggcttcttctttgtttgtctgttgatgcacctgtttgaattcgttcatgatcttttcacgatcgtcgacgcgtactttagcgcagatattgcgcatgacatgaaccaaacagcgttgaaaatgagctttaggataagtcctggccaaggctgttttcatgccaacaacaccatcagaaagaaagagttcaacttgcttcaagcctctggacttcatgttttgaagcatctctgtccagacttcaatgttctcactaggagcaatgcagtagtcaatgacttccttatgtccattaggtttaatgccaatggcaatatagactgcttcacgctcaaacgtttctcggcgcaaaggaaggtatgtcgcatccaaatagacgcagaaaaacttgtcgcttagcttgcgtttgtggtaagcctcaacctttggaatcatctgcttggaaatatttgatacctgagctggactgtaatggctgccatacatcttttcaattagatcggctatttccctggtggtcacgcccttggagtaaagcttgataatcatgctttccaagatatccgagtgctgcttgtagtcaggcagcgtgtgctgatgaaattgaccgttgcgatcccgaggcacttgcacttcaattgggccaaattgcgtatcaactttgcggaaataagcaccatttctagagttgccagtattccagccatttctggcatagggatcatagcccagaaaggcagtcaattcagcttctagcaagttattaacagcctgttgtagttctttgcgcaataaatcatttattttgtctggattgaatagagcttgagcaaaatctttggtaaaatcattcatgaaggagttcttctttctgtatgtgttttttttgttcaaaccaatcatacgagaaaggaactcctttttctaatgtttaaagaaataaatttaaggaatcattcatccttacacaaactattttacagtctcatttttattttgtactatagatttgatcattgaataaacaaaaaggagaaacaaaatggaaaaacaaaatttcaaaaaagtagtagcaagtgcagttttaactattggattaatttcaccaatggctatgacaaatcaaagtagtaattttcttttaggaacaaccaacactgttcaagcagccacccgtaaaattaaacttacgcataatgcttatatctataattatcgtggtcacagagttggaagaagagtgattcacaagcacgctacgcatatttacttctcagtaaagaaaattcatggtaaaaaatattacagaattggccataacagatatgttaaggctggcaacgccaaagtagttaaaaaacatagtaaaaaaattatcaaagaaactacatctgcagtttctaaatcaaacactagtgtaaatcctacttctactaatactaattcgttaggttcacctatttttaaggttcatgtattcgccggcggtaatgatgtatacaagaattcatctgataatagttggtttggagccaaggattttaaagatggtatttacaacgtttatgcttccaaaaatggtaaatacgaaattggccaaaacttatggatttctgaagatgctggtgagaaagtaaacggcactgataccacaaatacgtcctcagtcaataactcatccactagttcaaataaagtagccagttctaagaagaagcactctaacagtacaaatcaagacaaattatataattctcaggatattcaagaagtaaaaaaatattttgtaaaagatcttaatgattggcgtgaaaagcaaggacttaaaccttttacattagtaacttcgggttggttagcagatggagctaatgttcgagctaatgacaatgtacaattaattcatcaaactggtgattttgatcacgtaagacctaatgggcaaccttggtatactgcatttgcacatccttatgaattaaaaggcggagcattaacttcagtaagtgatggatctaaccctgaagattgtgcttatggtgctttttaccgtttaatatatgaggatgctgaaagtaattggggacacaaaaaagaattacaagaaaatttaagcagtccaaaaatggcaataggtattgcttacttttcacctaataatttagtattagacgttgtaacagctgattatgattagcaatttaaaagtttttaaaaaaagagagaatcaaaattgcaatgtcattaagttaagacattgacaattaagggtgcttttttagagatcgaatcatttggattcgatctctttttttgtataaaataaaggcgaaaagaccagccttttcgcctatcttatatattatatattttaaaccttcaaaattattgccagaaagatggtgttaattatgaaagcccttcataagaatattctagaacgtcttgatcaaattatcaataatactggggatcatattcacgattttattaataatcctcatgcttttaccaggaaacgcactttagatgcagcgacagtccttaaaactacaattaacatgcaaggtcagaatttaaacagtgaactctttagagcttttggcgaagatgcaactaaaaagaacgataaagtagttagtacttctgcctatgttcaacgcaaaagccagctttctcctgcttgttttaaacatattctgactgtttttaatcaaaatctatttaatattcaactttttgatcatcactaccgtttgtttgccattgatggctctgactttaatcaaatctggaatccgaaatcgaataacattgtacaagcttcttctcataaaaagaaaccctattgtcaaattcacgttaatgccttatatgatctattgaataatacctaccaggattgtatttttcagcctaaatcagaaatggatgaacgcaaagcggctgttcaaatgcttaaagctttgaattgtggtccatatattgtaacaatggatcgtggctacactagtttcaatatgattgaaaactgcaatcgcctgcctaactgtcattacataatacgaactaaggctggacaaggcggagttaaagaaataacgacattgcctgatcaagaatgtgatcgtgagatttcctgcctggtaactacttctaactattactacatcacgcataaagccagtgagaatattcaccatgtccagcatcattatcgccaatatattaagtatcgctctaaaaatacccaggatctaagctgggattttggcgagttatgcacaataaaatttcgagcctgcaaatttagaattaatgatgccaaatcaggcaaagaagaatgggaagttgtgctaaccaatcttgatcgaaaaaattatccgctaaaaagaattaaagagctttatcatctgcgttggggtattgagacctccttcaagaaattgaagtattctttaggcagtgtacagttccattccaaacaagataaatttattgaaatggaaatttatgcccatatgattatgtttaatgcaatcagtcaaattgatgcacaggcctatattccgcaaaagcattgcaagtatcaatatgccatcaatttcaagcaatcatgcttgattattcagagcatgtatttggcttcttctttaacgcaagattttgaacggatccttattcagatcagctattataccattccaattagaccaggccgcaaggacaagagaaatattaagcccaaatcagctgtatattatttatatcgcgtagcttaaaaaagcagaatctgtgctatgccttatttgttgtacgaaaaaagcaccaatttaaccaattaaatgttaaatcagtgctttaaaagtctaatattaattgtcaatgtcttaacttaatgacattgatcaaaattgattctctcttttcttattatctaatttggtaattaggttagtccataccagcggtttgatgacggcgaacatattcaactactgcaagtccagaaattgatacgagacctagagcaattaattcaacaaagatattgctcttagcattaccagtttgtggtaatgaaccattgtcagaactagtattattactttcctgaactgaaggtactggtaatgcaccagtagatactttttgcggagcattagattgagctggagcagaacctgatggagtattgtcattattttgactctcattttcaacgggtgctacagccttcttttgcttcttaacaggcttttgaacaggtttagtattcttaacaacatgacgtttaacaggcttacgagtctgaacatgtgttactggagcttgatcttgtgaactattgttattctcagtaactacatttgagctattaccagagttggtagtttcattaccagtagaagtttggttatttgaccctgtattatcagagccattattttctgaattattaccttggttattgtttgatccattgttgttagacccgttattaccagagttattgccctgattattattggatccattatttccagagttattaccttgattattattggatccattatttccagagttattaccttgattattattagatccattgtttccggaattaccattgttcgagctactattgtttgaactactgttatttccgttgttgttgttttcattattattattgctattgttattattgttgttgttatttacaacaacagtaccaccatgaactccacctctatgatggacgatcacaggaatagtggtatttctgtgatagtggtcaataacaatagattcactggcatcgtttaagtcagcatgttccataagaattctgcccttatagtacaaactctcaaatgccaccaaggtatgacctacatatggcattccatttaacttaaaggttaaggttactgtaccattagtcatacgaggtgtaaaccgaacagttgcaacaataggaacaccattttgaacaactggtaagccagttacttgatccatcagtttaccacgtaaagtatattgttgaccaggaattaaataagtataacgaactacatcttctgcaatattctgcgtcttaggatatacaaacttttgcgtattgtaagacaaagtagtatgcatttgtggatgagttacatgtaaggtttcactttggtcattaatgtctctatgatcggttaggaaatagccggtgtaataaagagtttcatatactaccaaatcatgatcccaataatggtgagcatcaaatgttactgacgcattaacttcaccattagcattttcagcagtaaaggttttactaaattctacttttttaccattattaagaactgccttacctgattgcttatccatcacaattcctttaacagtatatgttttaccaggaattaattccttataataaatagtatctgttaaagtttcaccatcagttggctgcaattgatttccatttgtttcagcattaatagccttagtatgaatttcaggtttagaaaagtgaatggtttcgtgtttatcattaagatcttggtgatcaactgaccaatgatttggcttatcagcacgttcagcatggctaaatacaaccacgtctttgcctgctaatgatgaagcatctggaatctttaattgcaccgaaacattgtcttcaataccatcatcattcttatcattattaggtgagccaatagtcttttcaacttcaatttgcttaccatcaatagtgataggttgaccagttgctttatctactaaccaagctttgacattatatttaacagtacctactaagtgggccaagcgtaattgttcattaattacaaccggtcctttaattggttgagcgaacttgctattatcttccaaattagtagcttcagaagttaaatgtaagtgcttatggttgttaattggtccttgtacagttaagtgataagcccaaacttcattttcaccatctttagttttcgtaactttagcattttgttgcaagttaggaagagtcaaatcaatatgaaccggagttggatcaacgtctaagtttttaccagttgaatgttcaatagcaatataatggtggaaatcagattgtggtaatacgccactcttggcaacaccgttcttgtcagtagtaatagtgcctacaaacttgcctttatcccaacccgaatcatcagtacattgatagatgtcaaacttggcttcaagaaccttatcattttcatcatcaaccttattaatatcaaattgagcataatttactttctcatgatacgttggtggtgttggtggcttttctggagtactccaatcataagtcttcttggccgtaccatgtttaacagccattaaagcaacaccattttggtgaacattatcacctgaatagtaaacagcagcaacagtattatatgctggaacctcagcagtaattgtaccagtcttagcattattatttaatttagcggtaaagttagttgcagttttaatttgtttagtatgagctgcaccaccttgtgttactgttaaacctttcagtttaatcgacatattacgtggctttttaattagcttcttattttcacgaacatctgcaataagctttctagtacgagaggttttagcagcttgggcacctacttgatgaattgataaagtagttgtaccatcaccacgatatgtagcatccttataatgcttcataatgtaattataacaagcttcagcaagcttgccaccagcagtttgattgaaagtaacatgaccaatactaccagctaccttccaaaccgcacattgtgtgccaaattcaaaagctttagcatcagcaggcataccttttccaagcttatctgccattgttttagaactgttagccccaaaaccacatcttaatacggcacgaacattaccattatcatagtgattaaactgttccttttcaccaatatttggagtatatttcattggttgcaagcagtagaatctcaaatcatgatctccatgccagccttcgtgaactgtatcttgtttgccacttggtgtcgtaacagtaccataatatccttgacccattgagtggtctcttacgatcgaactcattggaactttatccaagtgtttaatagcaaacgccttttgagtagttccaaggaacattggtaaagccatcgtgattgcagacaagaattttaatcctttatgttgttcttcaactaaagaattttgatagtcttgaacttttttcatggactttccttattctccttttcttaaaaagattaatggcagtagccccaacatgactgccaacatgttttaagcgataagttttgcaactcatcgtaattgataataaacgttactttttgaaaagagtttatttgtaaaagcaatcagaaaaacaaaaacaatttgctgaataaaataaaatttaacaaaattagtttcagccttgatactagttagattgatcataaagcaatataaaaaaattttattttatttatattttttataagttttaagttgaaaaaacctaaataatgcactactataaagaagaattaagttttagatttaattacagaaagaagttcaaaaaatgacccaaagtcaaaaaaatgttatgtacgtttcaaacgatttaggatatggcgatgacaaaggtaaatttggcggtgtacgaatcaaccaacctactgtttttgtccgtatctatgaaagtccaagttttgaaaatgttgactggaactcaaccgatgaactagatgccagagtaaagtcaattttcaactatctggatgtctctattaaagataaaagatatctaaccactgttgccgcagctaattctttaaaaactttaactacattaaaggatgatgcaccaacaggaaaagcacacagcgatgctgcattaatcatcccactttctttaattgccggtagagcaatacaagaagcttatgcagaagctaaaaagaatgaaactgaatttgacccagacgaagtaattacagtaaatgtctacatgactactgctcttccaattaccgaggctggaactaaagataatgacattagacctgaatacaagcaaagattcatggcacatcaacattccgtaacagttcattcattgggcaaagatattcaagttaatatcaaatttaaagatgcaaccatctttaaagaaggcgaaattgttgttgtaatggctatacagcacggtcccgctgatttccaaaagaaattaattaataaggttaagcatgttaagctggctgatggacttgtttttaatgatgatgcattagcagaaggactagttaaagatgctgatagcttcatgggaattgatgctggacaacatactgtagatatttcactctttaacaatggttcagtaaacgactatagtcaaagtatcaatcaaagtatgggtgacgttttagatgatgcatttaatatttatcaacaacaaaatcctaatggtacaagtttaactaccagcaaagattttaatgatatttggctaagagctatagaacctgaaaaggaagctaaaagtgctaaagaacgtttagctgcaattacggaaggaatgctaaagaaagacgttattgaagctgtagatcaaagcgttgaaccattaataaaccaaatcctaaccaaggttcgttacttaattagcaaaaatccaaaattacaaattatatttatctttggtggagcttctactccactaattgaacaatatcacttagatcaaagaattcaggatgaaattaatgctaagaagctccctattcctgttgtatgggttggcaaagaatatgcacaaaatatgaatgaaatggcgttagagctttttagtgaaatgcaaaaagcacgtcaaaaataattagaaaggagtagacgatgggtcgtaagaaagaaaaaagactagtaggcttcacttttagtagtaaaaccgagccagacctagcagattggcttgataagcaagacaataaaactaaatcaataaagtttcttattagacttgccattgcaaagtatggctatcaagacttagtatcattaggtttgttacacactacattagctctaggtgaacaatcaaatgagaaaactacttcagcgataaaaatagaaaataatgattcagaatctacctctaatccagttaaagctgaaaagaagtctactgtgtctaatactaaacatacaaccgaaacaaacagtaccaatacctcacttaatactgagagaaaaccgattgaaaaatctgtatctgacattacttcagataaggatgacaaaaaagatccatttaatcaattcggtgtctaatgtaaaaaggctagaaaaatttctagcctttttttctactcaaaattctataaatcagaggaatcaccgtcccacaacatcttgttaatatcttctggtaataattgttttgtattatgttccctttttttacttatttcttgtcgagttttacgttttactggtttaacctttttatcttttatttgagactttgaactagtttcatgaatttcagtcttagccttgttttggctaacattagaatgctgaatatgcttatcttctttatccgtctttgcctttttgattgacactacatcattcttggactcattaatgtttttaattgccaaattagctaaagcatcatttagatcaacattgccaaattgtttcttagccaagagtaacgccaaacgaactgttttcgacttatttttttgattctgtaaatatgaaattatctcatcagatttcgatgctttatcttgtaaaatataaaatttacagttaataacttttcttttcaaaatcatcacttcatgactttagctcgaactactaacccatcaaggtttagggtttgagcatatttttttctgacccaaagaatataaggagcattaaacggaaaaagattttgaatcacatctttaaatttatcatgaaagtgagtttttaggacattagcaccgcctccacataaaacgaccattccaatttgaccatgtaaagccctgtgaaaatctctaacttgttcaataatttgacgttctaaattagaagtttgctcatctaaaaaactcttatatactttactttctttgtcattagggcctttatctctattagctattttaataaaagtttgtctgtccataggtgcaataactggatatttttgtctcaaggcatcaatagcgttttctgctgaaatacccactccatttagaatacttcgattttgatttggtactcttatccctttattagtaacagcgaaatcaatagtgccatcacctatatctataattaaaacattacctgcttttaaaatatcttctcctgtgaaatcagatagcgcatattcttcaattaaatcatcaaagatttcgccttgacgataatttaatctttccggatcaaaaatcagacctgtaattgctgcaacaccttctggatcaacaaaaaccttcttaaatgataaatctacatgtactaaggtactaaaattattaatggttaccagatgatgataatcagcaaatcttttagcatacgactgttgcacacccttgattttaatctcatcaattggtaaagcagtagcaaacttatcaactactacatctaaattagttggaacataattataattctcaaaaaattttgataatgcataatatgaaattatactaaataagcaaatcaagccaatatcagattcacttttaccctcggaagattttacattgtaattaattggttcagttccagatattgaagcttgtggtcctacgaaatatcttccgttatctcgtatagctggactctgaactttaacgtccattttatctatgaaattagctaatgttgcttttacattatcaatgtcattaacatcaatggcttcaagttccttacctggtagtacgtcagacataattgatggaaaaataaaacgaagattattgagctgaactttcatgaacccattaccaccgtcagaagcatcaaccatgtgcaaagtattattatccgccacgtcaaattcaccctttctgttaacgctatatcaaattataacgacatcttgcctcaaatttggttttatctaagtaaaaagaaattgaagaatttttgctgttaaaattgtctcgaaacatgagatcaaatttaacaaaggtggttaaaattaatgcaagttctatcacaagaattattacaaaaatatcaaaatactggtgccgcctatgaaatctttcatagctatcacccattagaggatgctaataacaaattagtttacaagaaaactgtgccagataatttaaaacaacatgtagaaaagccagttcaacaaccaaataatccgcaaaacaataacggaactccagccactgatcaaacaccacaaaatgaaaattcatatgcttacggaaatggtacacagcagccaaatgctaatgatcatggctcacatagcagttttgtcaaaattccacctagtaagactactcaagaatcttcagttcaaaatactaggactaaccaagtaccaacagaatacgacagtcagaacagcactgcgaatactaatgatcaacctcaatcccatactttcacaatgcctaacctaaatgaaaatacaactactgaccaaactgaccctaactttcaagaagacaatacagtacctcctgaaactacggttaatgagcaaccgcaacattttagagccaataattatcaagcacagccaactaatgaacaacctgattatccagtcaagacagagcagacacaagcctccccttcagtttcgccaaatcgccagctcccaaatcaagaccgccaaattgatactcgcccacatagcgtattggccaaagaagtggccaagagcaatcgcattaatacaataaatgatgaaaatgctgaattgtatgaacaaatagctcatgtctcacaagagttagattggattcataaagtcaactcgtttgaactggcttacaaaaaagatttacgcaacttacctatccctgctttgcgagtatttaatattgaaaactctgaagaaatgatcttaccatttaatgatggttctttactgcatgatgtttcaagcatcacaattactagagatatggtcattatgcttcttttccgtaacaatactccacttaagcttgtaccagagggttggtacaacaacggtaacaatcgtgacattctaataaaaaatggcttcaattacttttataagagtgtcgatgcaaaacaattaaaggaaacactaaaattattaagtgtaaattactctagtacacccgaatttactcaatttattttaaaaacgatgccttttgttccaatacaaagtaactaattcaacaaaaaaggctccaatttggagccttttttgttagctaaaaactacttatgttagtcatcaaagtctgtaaaattattgctttgaccatgaatcgccttatcatagtccttttctaactgtttaggatcatctgcatcttcccatgaataaggatcattcttttgctcctccgtttcattccaactttttttaattaaatcactcaacttattaggcaataaatcaatattttgcttcatttgtttaagttgatgttgaacatctttaagatcaacattaatttgacttgccttatcagacttttttattgaagtttcatttacatctttatttactacctcacttaatgaatttactttgctagagagtaaagcaacagtagccttaaagtcgcttgtagtatcatctattttatctagaactttctgggtagccttaactaatgacttggagtcaattgaagctataggtttagaagaaattttagattgagtattttgaaaattactattttgttgcttcttatttttatcaatagtctttgaaataatgtatttcaggtcgaaaacatgtgttgaccaatgatacttagttatatcatattgggtcaagcaaaattgtgattttattaaagtaaaatacatccctacataagttacatatggacttaccgataataagcgattaatatcttttaaagaataatcagctaatgcagcggtatctttataagctagccaagcaaaaaatagggattgatctggtatttgtgcagatgacagcatgttttcggctttagatgcaataaaagctaattctgctgaatcagaattagcatatcgagcaatactaaaggtatctgcttttacctttaagtaaggttgaactagggtaaaagaaacatcagaatcaatataaacttcaatatgacttttaacaccataaatgaacaatgcatagaaataggtattctctttaaaaactgacgcaggcataacggtaatttgtcctgcagtatttaaagaattaatttcttttttgctttttttactccaagcattagctccatgcaacttccataagaaatttaaaatgttttcagtgtaatcagtggctttagcaaatgtcaaaatagccttttcaatttttggcaaggccatttttttatcaattttaacttcagtaattaatttagctaatttattttttggtgcctcaaaccattttcttaagatattcaaaataccacgataagacttatcggaagcacagtacataatccgcaaaagtagagttaatgaaccacggctaaattgaacattatgactaagacccaaagaaaagtatgtatcaactaacgtatttaatttttgattatctccaactacttctggaatcaataaaagctcaggacgcttagcttgattacaaaacacaacattgatatgtttcttttcagcacatttatctaaatccgcaatggaactatcgtttaaaattaacagtttagaatttttatctagctttaactgcgaagatatgggacgatgattccaatcaatagaaaccggcggttctagtacaaattgacgtatcggcatttatctctcacagcctttctaatagtcttcatcatcagtattgctagtcatacctggctgactattaaatggatcacggtcattaaatggaacatctgtatccaatttatcagccttcaattcatcccctgcattgtcattaggctcatcatcagtaattggtcgatcctgaaaactttttagcatttgttcaagatcatcgcttaagccatttgcttcttggctttctttaactttatgttccattgactgcacgtcatcagtttcatcaatagaattatgcaagttagcaaccttatcttgttgcttatcaatagctgtagtaattcgagcaataattttgtctaaactagctggcgtaaagtatgccgctaatttattacgctgttcttccctaaatttcagcattttatttagacattcaggttcagttagctctgaatcatgcaagattttattaaacccactttgcatgtcgagcaatgcactgtgctttaattgactaattaccgcattttgactatttgcttcatgttcctgctttctacgatcatggttaggtaaatcaacgaaattattcatactttcagacatattattatcttctttcttatcatcactatgaattatttcatctttattattaacttggcgatttgcggataaatcattatcttttaacttagattgttgtttttgagattggcttttgctttgatctggttttgtagcattaccttttttgctattttttactctattcgtgcctgctacattcgaaactaaaggatcatcgtcatactttaaatcattatcatttctgccattaccagaattaggcgatttatgtacagacttatccaacgcacgcatccctgctgttaaggaagattcatcgtttaaatcagaattgtctttgacagtactacctactttattaactctactagttgatgtagagtccttagtcttcttcgtcacaggcttggtgatttcttcactactatcgtcttctggatcagtatccaatagtgcgtcaactttgccctcatcgttaaattgatcttcatctaatttttgcttatgcccgccaacggtagcataagcacccgtttcattccaattatcaaaaggatcttgttctatgtcttcaggactagggccatctttatcagtacctaacgtacctgccttgcctgtagattgttttttattttgatgtcttaatcctcctgctttagtgaccttagattgcttagaatcagagttttcactaccattagcaaaagttacttttgttttatctgagtcagaatcttcatctgcagtattaccactcgaaagcacattaccttcactatcaagaatagttggtaaaacatcatcaccagatttcatttcttgatcacttggccactgaatcatatattgtttgctttgaattaaatcaataatgtgcttatcggtatcactatattcttgactggaggtcaccttgtcagcaatcattacttcataagcattcctatcttctggatcatccatattgaagtttttaggatcgttttcgattgcttcactagtgattctaccaacttgaatgcgatcaaaaatgttagtaccatgctcacctggcgttctaatcgccatagtatatttttccaacttcataatttgattagctgtaatatttggtactttctcaaccttagtagaaattcgactacgattctgtgattgatcagcagccaaatcaatgtcctggtcattgatagattcaactgcttcatcgtgttcaccgaacaatggctctaataacttagcgtcatcaggccctaaatcaccgaaagtagctctcgttagcaaaacggacattaatgtctttaaataatcaggaccaaaggtttgtgacagttgggctaatgattgtgcccctaagttaattcctgtaccaaacttacgagcctgggcacagaaatctgtaaaaccgcttgattcatagtcagggaactcgtccatatataagccacgaaatgggtcaacgttagctgtacgtctaaacgtagcagcttgaaaagttaaggaatacatttgacctaagatacttgctaatgggccacccaacgatttcttatcggtattacaaataatgataccgccgtttttaaaccaatcatcgacattaaaatctgagttctcacggaacaagacacgtcttaatccaatctttttagaaatatcctgtaaagtagacttaagcccgcccacaaactggtctttagtatcaacatagactggatatcccttatacttaccagtttgttgaatcttagggccagtcttgtattgctccgcaacaatgtaagtttgaaaccatttaagagtttcaacggcaatatcataggtgtccttatagttgaaatatgtagccttatcgtttttatcgttagttttgttaaatttctcttttgctttatctacttctactcgtagaatttctacataggcttcaagctcagttcttttcttgacggtaacataaacatcgaacatcatatccattagttcgccaaaactagctggcttattttcgataaccgcagttaatttaagcaaataaacataatttgccatgtaagaccgctcttcaatactaaagaagtcttttgctgatgcttttaagccggagaaaatatcagtcaggttttgggatgcagcgtcaactggcccactcagtaaccccaaagaaggtgtattaggatcttcaggattaaaatagataatcttatctttaggcacacccttagcaagacagtcttggtatgctgtctcacataaatcattggtaggttcaattaaagtaaatccgttagtgtacatgctttgttttccatatggtgcattccaatctttttctttagaaataattggatagccacgaatgtattccaaataagcatcaatgtcttgatcaatttgcggtctaaaccaggatgaagttttccccgcaccaattggcccgataacaattgaattacgcttacgtgcttctacgctctgaactaccaaatctccagtttccagtgaagtacccaaaaccatatttgcataatgatcttcttccttcacctgcttagcgttttttccagaaagcatttggtgtaatggacgataatgaaactcatagttagccatccattctcggattctaggttcaaattgtaagactaatcttacaaaacgagaatgcagataaaacatcgaaattattgctacaccaactaataaaagcctaattatcaaaggagaaccagttatttgatcaatcatttgagtagtggtgcctttaacagtaggatgcaaacgaagaaactgcaaaaaaggtatagcagttaaagaaataggcaatgcaagggatgcaccaacaatgtacgacaactgcttaaatcctatttgtaattcatcccacattaggtcaacacgttcatcctgctttttgtcatctcttcgtgttgttaaaagaattagaaaccagttaacaaaacaagatgctggagcgctcagcgctaaaattagccagcaaaataatgtaaaaacggagaaattaagcgttccaagtggcaaaataatttgaaaaagacaaataacccatattacagtgggcgctatccatagcagtgttctaagccactcaaaagtctctctcgctttttttaatgaaattccatctaaaacagaagtatatgtattcagcttctcttcaattttttgcttaattttctcgatcactaaaaatcacatcctaaaacaatcatttttagtgtaaaaaaaaacgccctattaggggcgtactgcgaatatacttgaaattattatatttgttcaagctgatctgaaattttaattcaccttaaagttgcttaatagcaaaggactttagaaaagtgccttagcagttttactatcaaaatgaatctttttaagaaactcagctctacgctttaaagctaggcgatattcttttgacattttatttcctttagtttctgacattatgattacctgctcagtataatagcgcttatttgtaggcgtgcggtgcgctggaaatattcccttgcgatcccattcctgcaaagtacgtactgtaactcctaaacggtcagccatctctctaggtttaagcatagccataatcttcacctccacatattgcctttgataaagattatagcacatgcttctatgttattctatgatcttctgctctttctctttactacataatagctaatcattcctttctccgtttttcactctacagaagagtttatctcaaaggtatgcctagaaacgaaaactaaacaaaaaaatcaaaaaattatctttttaggaagtggaaaaacgctttccctatctgaagccagccgttagtttgctgtggctcagttaacgcattagttgttcctactttcgcttgttgaaaaacatacaacaaagcaaaaataattactaaaattaataataagcctataaaaatcagccatacattgtaatgcttcttctgattcataccttaatgccctagcaacttagatgatgcgtcaatatcagcaggatctcgtagaatcaagcgagcagccatctgagctgttactattggacttctagaatctccattaccgaaccagccttgaattttgctttgattacctttcatcaaagctgcagttgtggtttcagaacatccaagcgaaattaacatttgataaatatcggccttatacttatcaagctcttcagtcatattaatgtggtttctggccatgtaaatatccctcttcctcattacctgcattagcaacagaaccataacgataaaacattctttttaaagtcttatcatgtccgctgtaataagtaattggctcacgaattttcttaactgcattattgcttggaattatcgggactctatttagtaccttacgatcttttctagcatttaataaagctagtaatttgtgaataaagctcatctacctattccctttgcttaaaaatctgatacggcaatctgactgacgaaaaagacaaatactgcaactactgataaactagcaatccaaatacttaccaacattgatttataataccaagcggttcttcgaataaattttcgcaatgtcttacggttatcaatcgtaaagagaatttgaagaatgaaaaagaaaatcgtaataatatagatttcccgcccaaattgtgtaatccagcgtggtgcatatagtaaagctaagcctaagatagaaaacaaagtactgatctctaaatcaaacttccagttttcctctacaaaggaatttaactcatcacgctgaactactgcattaacgcaaatttcaaacatccataaaacattaataacagttaagatttctgttgcatatgcagaatattgttgcaaaaaaataaaaaatgtattttgtgacatatttcaattatctccgtatttctttgatgttatatacaggtttcgtttaagaatttagcctaattaacaagttgattgcagatagtaaaaatcagcaaaaaagcggaaatttgaaaaatctccgcttactttattatttaattttgttgcaacgctttagaaaaagctcttctttgcaacacccatagctgccaaagtagctgtcataattccaccaagttcaagacccattgaacctttagcattaccagtttgcggtaaggttgaggttgaagtatcacctgagcctgcagcagtaccggttgaaccagtaccagcgcctgaattagaatcacctgagcttgcattacctggatcacttacgccagcattattagctgagccgttgtttgctccagcatcattgccagtgccgacaccggtgttaaaattatcaccatcaccgttgccattaccaccattgcctgaaccggcattcttgttcgtagcgttatcagcggtattaggatcaccgtctgaagatgcaccattgccgttgttagaactaccattattgttagttgatacaggagttacaggagtagcatagttgttacccttatttgaatgtgatgacgaaccattgcttccattacggttaccgctattgccattattatcatttgatgtagttgataatgaactgccattagtagttgtacctgagcctgcgttaccagtattgcttaagttgttgcttagcaaactggaatttgagttattgttggaattattattgttattatccactaataacgaatcaccccaaccgccaaaaccatccaatcctttaacaatggtttgactatttgatgatgaacttgacttattatcacctttagtggaagtttgtgatgaactttggttatttccactatgacttgaagtattgttttcaccaacaccattgcctgcaccgttgccagcaccagtattaaccgccataaggttagtggtcaaaccatttaagccattcaaactgtttaaaccattattgttatttgatgaattgttagatgaattattgttattgttgttattattgttgttattatctacgactaaggcaccgccaccatcatcataatagccatcccatacaacaggaactccattaacattgtagtaaggaacaccgtttacgtagtaaacgcctgctggtccttctacagcatcttcttcaccatcgccatccttatcggcattggtccatcccattgatgtcatcttattagggtcagcatcaccaggattaaaacgaccttcggctgaatcaccataaacatcatcagaagtatcacttgctgacttgccattagtgttttcagcaatattccagtcggtttgagtgttatcagtaccaggttcgatctcataatcaggtttatgtgtccatgaatctgcggcctgatcaggactttgaaactcccaaccaattgaactatgttgagcttgattagtgtcatgagcagtatcgccagccacatcattgtaagcgtctttatcggttacaacggtttgagtacctggttggttatcaccaacacttggcttcgtattaatgtcttgtgattcaccagtatcagcgtgagcaacgactgacatcaatggactagcagcaacgcctaatccacctgcagcagcaatcagcgcagtaccagaatattgtaaacttttagaaatactcactgtgtaaatcctctttctttcaaaaatttgactaaaaaacaatatgagctagaaagctttactttttagtacacataatgaatttaagacaaaatcctaaaattaagttcctacgtcaaattagatgaaaaaatttagaaaacgaagtactaaattgattgctactgaaagtactaaagataagctcattagtaagacaaaagctgtcataattttcaaaagccaagcgctaatcatagatcccaagcctaagaaagttaaaactgacaatattactagcacaataagataaagtgcaataaatgcaccaaatgcattatgcaagtctgctgggcttaaatcaaagccaccaatgacgatattagcaattataatcaatccgattagcatagtaactattgaggtcatatccatgttggcaaacaagttaggattagctataacttgctgaacttttagcatggaatatgacgttgctgccttttcaaggcttaatacaaactggtacacattaggcattgtggttttcaaaacccaatagattgccaaagtacatccccaaattggagcagttccaataaataaattacccatattttgatacgtggagttggcattccatgtttgtcttacatagcctaaagcaccatcgtttcttgcaacatttctgggaagaattaacggtttaaattcaacaatattgtgtccaaagattagtgccataacagcgtgactacactcatgtataaaaatccctacgcatcctaaccatatttgggaactaaagccatatttacgtactagtagctctttagaattacgattgatataagttagaccaagtacaactgcggttggtattaacattgcaataagcaaattaacaataattgaaattagttctgaatacattttttaacctctttggcccaatattactaaaggcaatgaactaatatgatatctgtaaaaattacaaaaaaacgagtctacatcagtagattcgggtgagagtcggttcttaatatttgttagatttcgaaatcttcttcatgggtatctgggttagtatatatgggtatatcttcataagaataatcatctaatggatcaatattatatttaactttatctccatctattgtagtttgcccaaaaacactatatggtgcatttagaataaatggtatatatggcatttttggcggaagcatatcgccaaaacgattctttaaaatagagagtttaattgccttttcagggagtaatttaacgtatcgcatggcagaaggaatagttaccctatgattttttattgcttcagcaatagtaatttgtttaccttctttttcaggaaaatctcgattttgttcaatagctttctcctgttcatagtcaactaaattaagatctcgaccactactaatatcattaatccatacacgattaaaatcattctccattataaatacaacatcagctgtatattcaatgtctccactctctttaaatgctgtttcatcaacgtcaattgagctatagctagaacggttaaatgaactaattacaaaaacgggaatttttaaagataatgataataattttaacttattaactgcagctgtaactgcttgtttatcagtatatccatgatttccttcaactggccttaaaagttgtaaataatcaacaaaaactaccggattattcttagtagtttgtacataatcggttacttctttaacaatttcatctactgatgggcgcttagttaatggagaactaataatcatattctcagaaaagctattgtaatatgccatagctgtacgcaatttctttttattttcttcactaaaattttctttaatgtgccctctcataatgttacgtgctgtcaacggtaaatcactatgttgagcaatattttgaataggattatacgtatcatgatcttctgtaagactccaagctattctactaagtgatttggcaattaactcattagcagacatttccagcgcataataaattacttttcgattttcatgagatgcaatatgatttgcaatttgtagtgcaaatgtagttttacctaatccagacgttgcccctaaaacgtataagccattatatagtccacttcccaatcctacgttatcaagcagtagaaatcctgtagaaataggatttggggtatcctcttccctaatgctttttatgaaatcaccatagacattatttgtcattaagttggtcatactattttcctttaaataaaattttgaactaattaatcaaaaagattaccaaatgctgaatctatcatggaaccactagaagtatggtttttgacagtagatttatgatttttcttttctctattgaaattatcgttcttgtcttcttgtttctttttatcagctgatttaacatttttaggcttaatttttctgaatttaccattacttgtatttggcgtatctttgtcgcttaattgtattttttgtggtttaaaagtaaaggtatatttagacaacgttgctctgccaacttctcctgaacttacgtattcttttttacatctaagattttgagttaaacccttctcatttagttctttgattgcagggttaattattctcacatcaatagtagatctctgaccacttctacgataacttttaggtacatccattagtttgtagaataaatctctttcatatgaaaacttgcctgtcgttttccattgcatgatcagagtatataaacgctgtgaatatctagagtttaatgtcattaaattagccagcacaaaagaggtataagtggcttttaaattacgtaaaaaaggtatcaacgttttattagctaaaacccatatatcttcatcttcctcgctaatatcaacattagttataggcactactattctttctctgtatttacctggtacatctgtcttttcaataaatttggcttgggttaggtcttcgaacattttcccaattgtattacttaatcttcttttcgataaatgtttcaaatctgctagttgtgcaatttcgttgtaagaaaaatgtataccattctcaatgattttattatcagattgattagccatctgacttaaaacagcccaaaatacttttatttcattttttgtcaatccatgtaattccaaggaattaatttgatttgcaattttagctatatcgtgacgctcaagtttttttcctcgtttatcgtatgccatatgcagcaaccttcctttctcctttggagctattatataattaatccaataaacatacaatgaatattcaaatgtatgtttatgtggcttataaagtggagaaagtgtattaaaacttgaaaccctagtatttatccttcctaataaacatgcattatttaaatttatgtatgtttattaaatgactatttggaaaaatcgtatgtttattttgaaaaatttggcaaaactgtatgttattaggacatatttgcattgatgcaatgtaaataaacggtctataaacattaagaacactgtgtttaaaagtaaacagagtctttatttttacaaaggaagtttgcttggaaaaactgtatgcttattcgattttcttttggaaaaactgcatgtttattcagctttttttgacaaaaccgtatgtttattcagttattctttggaaaaactgcatgtttatttggagaaactgcatgtttatgaattctgaccactacagtaccaaggcttctacgatctgcaaagggctttaaagggcccttcttaaaagggcctctttaaagtgaaaactaaatctcgttaaaacctcaatttagtttaatcacaatgcatcaagatcaacaaacttaaactagaacatattcaattaagatcaagctaagggttacacccttagaaacctgtgcaactcattcgctcctattaaacgcagcaaagctgcttattaaaagtcgttagaatgagttaaaaatgcaacttgtaatcatttgtttaatttgacattaatttcactcagcttaattaaatctaaaagaaataattctacgaacccttaaaaagtttagctatggaattaataaatccggtaaaccaatcggaaaagtggaaattagttggaagagtatttgatttattgttattaacaagtttatgtgcttttttattaatttgactgactaattgactagcttgaaatttaaagtcactgtttagtgaaccagaatctctaacattttctaataacttgaagatagcgtttttttgatcattgttaatagcattatctaaatgattgttactgagttgattattgattattgctttaatttgatcatttgaaacgttacttttttgattgctcatatcttttttagcttctgcaatagctttatttaattgggaatcagagtaattattttcccctttattctgattattaatactactgagagtgttgatttcatcttgagcagcatcaatttgcttttgatttaaattagtatcttgttccttacaagccttatatacaccagctaaagcatttgaaccgtcaattggaactgcagaagtaatatagattttacaattttgaattccagcagttaaagcagcattggcatattgatcttcagtagtggtagttatgttgtttttaccgtgatatggaataatttgaacttatactccatgatttttagttttctgaagcatagcacttgaccaaactttagagttaattgtgaaattgtttccagcaggatttaagtatttaactaagtctttaccggtagtattggtttcttgataattggccccatgtaagaattgagtaagaactttgatagtttgttgtctttgcttgctttttaaagaagtccctagagcaattaccggtattgtcgatagttcactagtatcagctttgaccgtagttgaattcaaattcatcaagctagtaagtattgtaaatgcagtaatcgaaagaagtaaatgcttaataaatttcatgtttttgacctcgtttattttaatctgaatgttcaatttaattttaattacaagttcaaaattggttggtaatgtaagtgataataaaaatctatctgttagtaattggaactagtacgatagatttttcagtattcaattgcttagattgtttggttggtgaacggttgatcggacaaggtattgatgtaaataagttgttgaaatttttgagttgttaaattataagtgcctgcgtaaagaacaactaatttttttgctgattgtgttcctgtccaatgctttgaagtagatttaattagaacattacgtagatcgttgttaacgaagtcaattgaagtagtagcattcaaaaattttgaatgtaatcgttgagcattaattaaatgtgatccatctttttgtttatcattaccgaaaaaatccggattggataaaattgattgctcagcgtagacttttgctttttctcctctgatgttatagctgctggagtcatcatatgtgagcataattttcaatagttgattagctgtataatctgcgtcatgttgggcagtgacttgtaagacgtttgatctagtttgccaagtttgatttgtgagcagttgttgggaaagtatggtggtgtaatgtagctctttaatagtcttggttaaattgtatcttttagcagtttgattgatttgaaactgattataaccagttttaccaactaaaaagcagaatacgagggcagacgctaaagttagggatgcagtaaaatattttagaattttgtagatcattttatatcacctttttattcagtagctagtttaaatcgagtattagtagcttgattcttgttcagattgtacttgacagttatataagctattcctgtttttctattttgaatatgtttttttaaggcaaattccgtgtaaattactaggtcaatggaatcgcttttagcataatatttagagaaagttacaatagttcttatattttgccctattagcttgtctgatgtgttaattttacttttatgtatatttatagctgtatgataaaaattttctccaaagtaccttaaaagctgttcatgactattgaaaatattcttgctatcgtgatttctggaaaatattaatttagttagattagtatatttagttttcaagtgttgtaattttgaattcagattgattttggagctatttagagcatgtatattcgttagacattgctttctagtgtgattatacttatttgctaataaaacgcttctatcggcttgaatttggctcagatcaaaagatgagctaaataaatagcatccccaacataggattaggaatgctaagaagtagaataaagatttttgcttgttggttgaatgtgctgaacctgattttaagttgttaatctgcattttccgcaccttcaaaaatattaccgaatctataaagttggctaaatctccctgtagcgtagttataagtacctaagtaaagatcttggcttgctgatctacgtttgttagtaaaccaacttacataatttactttaataattattggcaggttgtttttagagatgttgccggcagagaagttaagactacttagatgtgagtgtaatcctgagtaatcaatataagtagctgcgcttttgttttgattaaaaatctgcttgtcctggagaatattcttggcaacatactttgcggctttatcactgcgagcgagatactctttggcactactatagttgattagaattggaaataacaagttagctttttgttcagcttgtgtgcttgctgcaagttgtctggagcttcttttaataatgggatttgtgttgttcaatgcttcttgctgcatttgtacgtctaggctatgttttttatccgagatattagattttaatgttgagttagtatgtttaaggttagaaatttgtttagcttgtagtccttggccatggttaaagtagacaagactaccaattagcacaattactacaattagagctaaggtttgtaaatatcttaaagacatagtccataatgtcttatcttgacggtagtttctcatgattaattttcctctaatctaaagttgaaaactgcagatcagtattagatgcagtgtggtctcgatagttatataagcaagtaaggtaaaccacaccacgactttgatgttcccttttgtgtgttagataaaaggtagtataggcggtaattgtttctgtcatattagcaatatcaaagtcagaaaaagcaattctggtagcgatagtttgcttggccagtggggagtgattgctgtcaaagctattatctttaatttgactgtaaccactattaccgaagtatttaacaaataaatcagaatgcttagttaagtcgctgggcttcttagccgtaccgtaagcatatttcagtaaagtgacgtatgctttgctgagtttttgctgatgcttggttaagtcaaattctcctctagtgattatgtttttcttaggtttgatctggctgtattttgttttaagctttttgctttggttttggagagtggcaatttgctgttgctgctcatgataagcctggtagcttgtgtaacagcttaaaagcaatataaaagctagagcgccagtgattccaatgtatacccaaggattaatttggggccaaaaaccagtatcttgttttctcatgtttcgattaggtcttctcaatttttatcttcctcgttttcagtttactgatgtttgtgtaatgctacttactttgccactgaagctatcaactacaaagctcatagaaaccctgattttgttaaagccatggggttgatactgtaaattaacgttaaagcgatagttatcatcatcggttcctttgtccccttgctcaatttcagcattatttactttgtatttagtaccaggttttggaactgcttctcttcgcattccaccatgatcaccgtgaactactgtcccttcatctgaagtaacattgacaatatcgttaaaatcttgtagagcttcagtatccttgtagacactgtttaagtcagatttgaagttgtcggatagattattcaaatccatcgtattgcttccagcagtttgagaaactgtaacagcttttaaaccaagagagatagctttgtttacattttgttgagcttgggatgcaggaaaagtatcctttgtttttttcaaatcttcattaacttggttgtgaaaatgaatttcatctcttttttctttctgaatcctggcaatcttagcctgacgaatagcttcttgttgacgtttattctgataccagcttagcctcaaaatgaaagcaataacgaaaactacaccaataattatccaagcaattgtactgcgcttcatgattaatcccccttagttaatgattattttttggttgctcttgcgaaggtaacactaccgccattcagcagactaccaaaggctgggccgattgtagatttattgacaccaccatcaccgcctgtaccaccttcttcgacaattctggtactattgccatgatatttttcaagcagaatagcggtatgtccatcgtctccactaccaccgccttggttaacaataattatgtctcctcggcgagctttgctcttaggtatagcgtgtaaccagtgatgtgcgcccttggcatcttgctccattgttttggtataccaacccatatttgcaggtactttatatcctgctttggctagagcaaaccacacaaaccctgaacagtctgtaacaccattcttgtttggatgcttgactgagccaatataggattcaccatgagactgttcatagtggaaccagccaatataacgtagagcggttttagcaatatcaccatggactgcaccgccatcgccaccattatcacaatcatcatcaccagaactggcagcatcagaagcacctttagcagcgccaccaagtaagctgtttttgcctttgtatttagcaccaccgaacatgcggtaagctttttgggcagcactttgtctttgaactttagttgcggcaatactagctggacgttcatatatggtttcccataagtaagcacattccgctggtgatttacctttagatgcatgtaagaattgttcatatgctcccttatatctgtggtcagttctaacgaaatcaccctcgcctttgaccgtccatttgccaaatctcttggtatatctttgattgacagattcgtcttcaggagtaggagtaaattggtaaaagccctgaccaccgccgccgccaatttcttcttgtcctggactaaaggttggatcttctgcaccggcaacattaccaataatgccagcagcttgagcaccagagagaccatgactaacccaatattggaaaatcgcctcggcagttttgtaagctcttgtgcctttagttgtccaagcccctccagcacctttaattactttgccagcatcgctagaatagtcctgacaatcgtcatcgttttgcttttgctgtaagtcccaaagacctactccgttaagtgatacgaaaaaggcagcaaaaataattattccgatactaatgaatactactgcatgtttcttaacaaaagggaaaatcttagccaccacccaaaaataaacttaaaaatgaattctgctcaaagtttaatttgaatcgtgaaatcttggggtattcgtaaatccttgaagcttgttaaaaatatgatacgttgtataattaaaagaagcacaagtctatcaaggcttgtgctatataaagagtaaaacttaattcacaaatttaagcacttggctattacctcaacatcttgactttgggtcgccaagcgcttttattttactttctatcaaatataaatagattatagcaaattatgcaagcaatttaaacaaattatttgaataataaaataatataaataatttatattatgtgttgattattgctacctgacataagattacccaaatatattaaatgctgattttaattataaaaaatatataaaaatttacattttcaatttaaataaaactaagatactatttcattaaacaattatatttttgaataaatactaaatagtagtaaagcctttaataattcacttcctaagagagtaatttgaaataaaagtcaaataaaaataaattaaacttatcataaacggctattaatgcttaaaatatagtgtaaataggtacagtaaaaaaatataaataatatataaacaaaataagatagcatggtttagattaaatcatgctgtcttttacataagaatagttcttagagtttatttggattgtttgaatttttgaaattaagagtatttcctaattagtttttttaactgtcccctcctttcatagcgatagaatgttgctggtggaacatgataaaaattcgcagcggcaagtctattcttgaaatattttccatttattttgatagttttagtatttaagcgaggattcttttgtaatgcacgaagtaaatgctcatcacggtagcccttttggtagtaggatctaaccgttgaataaggaaagccgtaatgtttagcaaatgtgcttatgcagtagacctccgttttgattcttatgggcttcatgacggtacaccactaatctttattgttatcgtcttgatagaacttatttagtagattggttggtttaccagattgtggttgagtatctttttcttgtggacgcttaacttgtggtatttgtgagctggttctattcataaagtcttgtaactcttttgctcctttattagttggctgccctgattctactaagttttggatatcattattgtcttcattgaaagagtcatttggattattgtctacgttaggggcaacgtccttgtgatgatttaattttgcttcagcgggtgacatattgctggagttagtattgtctgaatcttcacgttgggttgaactctgagattgattattggtgataacggctttgtttggattattctgttgttcttgaactttttgctcacctaaaatgtcttgtaatgatgcagtagcagcggagaattcatctgaacctgcgcggtaaacgaatgctgtatttggattattaagaccaaatacgccacgcttgattgcagaatcaactacagagtagccatcaatcttaattgcttgaacagtgtaagattcattgtaatgccccttcttaacaataggcttatgaatctcttcgccttgaacggaaataaagcgaacagtgatacttctttcttcaggagcatatttgattggaatagtttgatgagtacctttagctaagtcaaaacttaagttaatcttattaccattaacaggttggtatccatcgacttgtggcacatcgacagtttgtggctccttgaattgtccaataatttcacggctcttagtaaggtcttgattatcttcagtttgagcaataagagtaacagtgattgtcttaggaattacagtaacatcataatgtcctgagccatctaagcgtaattttgcatcagtttgtccggctggtaaaaagtagccattggggatttgactattaacatcaatgccttcaccatagtatccttcgtgcgctggaatagaaccaacgacttttttattcttatcaataaagttgatagtgtagttttctgtgtcgactgcatagacaatagttagatcttgggtagttgcagtgaatacacctttaatcgtcttgttttgggtatgataaccggttttaggcttaacgctgtattcaaacttctcagcagttacaccctctaaaatatcgtccttataaggctgttgtccatcacgattgccacctttaatgattgtatgaataataattttctgcttttcaggatcataattaattggaaaaatctttttatcatatttagcattgatatgaccgttaattacatgtttagctaaagaaaagccgggaatatcaggcattcgaacactaaaggtttgttttaccaggccagttacatgttgattataataactatcaatttgatgtccatattgatttgttgggattaagtcgaattcaactttttgcggttggtaagttaaatcaatatctaatctgccagcagtaaatttgctttttagtttgccgttagcttcaagaaacttaaaaccgtcaagttgctttggtttaaagtcataaggttgaccaaagtagcctgtaatcttatcatccggacaaagtgtattgaaagtagtgtcattgtagtgaaaaacaatgcttgctttcattggctcatagttaaagttaacagtaattggtttagagcctactaccccactagcatttttaggtatttcacgaagtaagaatccatcaatgtttagtggatcggttgagtaagtggagcctgccaattccttagttctttcagtatcatagtgtggaattggtttgtgagtttgggcatttaagtagtttacggttaatgaaacttcttttggctgataatggatttccctagtttcgttaggaatgtgaaatttgccagtaatttctttcttgggttgttggaagccatcaactgctggcagaataaatttgtatgtatccccccagtcgccagtttggattaatgtagctttagtattttgtagtaaacgaccagcttcatcttctagtaataatttaacggtacatttgattttatgataaaccacattgacagtcggattcttcatagcattgaatctgcctttgatgcgtgctttatctggaatgtagccgtcaataaccggaacagcttcattatataaattaccaactatcccgctgattaccatatcttcaccagcgctttgaccatgaatttcatcgaaccagcgcttaacatggaaagttttagttgcacgtttgaatcttaaagttactttttcatgttcttgggtgtaaataccatttaaaatttccggtgaactagctagttcatagccatcaatagtaggaagcttgatgtaataggattccttaaagtggccttgataagtcaaaggcttatgaacttgattcccgctttcatcaaagtagttaacttcaagggtagtagggattggcttatatacaagagtcagattattaacatctggactgtaattacctgaaagcttggctgatttagctgtgtctaattcatagcctttaaatttatgttgatttggcttaatagtgtaggactcgccagtcttaccgtgtaagtagaaatcattaaggctttcatgattagtgttgacacaagtaacatgcacgctattttgactagcaccatagacaacttttacttcgccgccattttgtggtacttggtaatttcttgatttgtataagtagtagcctttaatttttggcataactaagtgttgaatatcttcacctactacgcccttaaatttcttagccagtttaggattaattacttggttgccttctgttacaggcataattgtgtagtcgacagtatcaggcaagtagtttaagttaagatgttgctctttttcagttaatctgcgattaatttttaaatcgtctggtaatttgtagccaggaatattcggcaacttttcttttgttagtggctcacctactttgccagtaaagacaaagtcgttattaatcttctcaccgtgactgaggaatttaacgatgataggcttacttaccttttcaggtttaggcagatgttttttatttttttcaactaacttgccttttccgtcattattatcttcaaaagtcattgagccaagcttaatctcccttttgcctttttctgaattagaagcgtctgattctttattaggctcctcatctttagaatcatttttagtttgagcagtactttcgcttgtttcttcagcaactttatgattagtttcttcgacagaatcttcggtattagtatcatcttcttctgtctctgattggactggcttgtcgtcagttttgttctctttgtcttctgcaacatttggcataacagtttgatgatcagcattttggggcttaccagttactgatttgtcctctttctttttattaccaaataaatctgaaaacatactcatctagagttcctccttaaaatgttttaatactttcaacaatgcttattttcgcaggcatgaggggttaaaagagtttagttaattcaaactaaaaattgagaaaaagactaaaaaaagtagatttatcagtaatacacgattctcaaattagaattaatctcgtatgatttggtcactaccaagcaataaataccaaaaaagcaggctttttatgcgtttttgactaatattaattaaaaaattacggataatgattggcaacttaccgtcaaaaatacacacagacagagtaaaaaaaggtattagaatatcagaagtcactgtaaaaaagctattaaattagctatagaccagatttaactcttaattgctacgataggcatgtaaacaataagattaaagggagagttgtatgaacttaggaattacgattattcagtctctaaatcaactaaaatttactgtgattgtggtagcgctactcatactgtttatcattttcgattttcatgctcatctaaaaaaatcaaatgctgcaaagtcggaatcagtttatttaaattgggataattctttaaataaggccgttttagtaatttgctttggaaaaagcaaatcaatgaccatcgcacttacacaggagcaatttgctacattacgtcatgattttgaagaaataaatgatgagctgcataatactcagaaaaatttggcagttgatgtattaaataaagttaagcattcaagtagtagtaataaaaagacgaaagttgaaataccgttgactttattaaaaaagtaccaagcagatgaacggaaattaacgcactttgaacataagattgcttctaaaaaggcaggtacaagaaaatcttcgaataatttagaaagcaaaaaataagcattaatgagataaagctacattaatgcttatttcttattttgttttagtgctttgtactgaatggttctacgagaaagccatttagaataatcgcttatttttaatttttttaaattgtaatgaattcgatgaaatgttttatattggacaaccggtaaatattttgcaacatgaatgtctctaataccagttagtccatagtcaactagtttgattttcttttgttgttgactagctattgcgttatttgtcttaatttgagccttaatacttgctagtttaattgagtattgctcacctttgtatctcttacgcatcgctcgccaattttgaaaaatggaattattaagctcttgtgttttactccaaataaaattgcgttttctcaagacgttttctctactaatcgggtattgttctacatcggctttaaagtagatttcgtctccataaagcaattcttgggggatgcttttaaaaaaggagtgattaacatctagccaaatatgatctgctacccatgttttatcttttgtgtcatgcggagtatcagtacgatgaaatttaatttcatgatcctttgcatcaactaaataaagattcaatagtagtatgacagcctgataacaatcattttttaagtaatgggaaagatgatcgaatgtcgcatgataatatacgggtggctgttggaaatagtcacctaagataaatctttggttattcatttacatataaataataaataaaaagttagtttaaaagtcaaaaaagctaacttttattatgttttttgactattttttaggtttgttttcaaaggaaaagtatccaaataactttccttcaaagccatagtactacggcctttataaaaagtaaagagtaatattaatgttgtatgtattgctttaaacataaaataaatacaaattaaatatataaataatatgaacaaaagatgcaaaaaatatactcaatatttcaaatgaaacagggtactcattaaatggagaatgtgtttagatttatcgcttgtttttctgataaattactaaaattgcccagattataatggcagcaaaactcaataaagctttttgatagctgagttgggtaagtaaatcttcaaaacaaataataaaaattgataagagaattgatcccccgataaatatttttaagaaatctagaaaatagtaacgaataaatttacttttagtcgtcttagtgctgttcgaactatgaaagacatctgataagacaactggaaatattgctgatagtacaaaaagtactacatagtaataccaatgaaatatgatgaaaccaatcatgcaatttaccttattagaaaaacatgtaatatgcgaaagcaactagagaagcaataaccaaagcaataattaaatatgtactggttcggtcaaaaatatgattattttctttgcttttcaattccttgctaggactagaagaatcatgcttttcaaaatatctgatacttttttcacgattaataggctgcaagccacctgatctacgatgctcatgttttttttgttttgttgtcttttcaggtacttgctgtgattgatgcttagcattgattctgtctgcctcttcaggtgacagcacatgtatcgttaaatagtcaagtgtcatgttcatttcattatccataactgatattgatacggtgtaagttccagtgtgactgtaatctactttggaagtatctagaataaggtgttgcttatctaggtatatcttgtttccttgataatcactagcattaatatgtgttaattgaagtaaatcataaggattgggtaaattagtctgataaacataaatatcccttggatttactgatacttttggctcaaacatgtattttcctccctaaagtaactaaaaaaattttaagtgcttttaattccttactgtaaaaagctaaaaaaagcctaaattttgaaaaatacttgcttacctaaagaccaagtagactaaagacaacaagaatgtaaaaggaaggatacaattttgaataatgcagcaatgggggaagaaaaaactaaaagctttctatggaaaatttggacttggttatggccagtacttttggcggtaggtatggtgcttattgcacatcattttgtttattcggtacatgtgtcaggcccttcaatggaacctaatttgtacaatggcgaacctattttttgttttaagaaattcgtcccaatacatagaggatccgtagtttgctttgatgcatacggtgttgaccctcaatgtaagacaccgggaaagatatatgttaagcgggtaataggggtagaaggcgacacagtcagatctcataatggacgactttatgttaacgacaaattggttagccaaagttatatttcttcaagtcaaagaaataaggagagtactggcaactggaatttagcttcattgtcagaaatgcatttatggcactctcatacagacgagcaaaaagtacctaaaggtgcatattttgttatgggagataaccgaaaagtttcaaatgatagcagatattttggctttgtaccagaggatcacgtcttagggccggtaaaggtcttcaagttgaatacaaatgcaactagaagagacaatattaataaattttggaagcattattttgaggcaaataatgacaactagcttagatcaaaaaataaaagtgctaaaccgaaaaataaacttcaatatgagaatagcaacttggataaatttgacaatagggctaattactatcgtgatagcatttttttaataccatatagggcattcatgctgccaggtgttgcttcgttaagcttgggactttattatgtatatcgagagcaaagtctaaaacatgaagcgtggcagcatttagatgtgttagtcatacttttaataattaatttgttttgtggagctattattccagtcatttttattttctttgctattaaagaaaggcatcaaattaacaaattaagtgggaaatcatatataaaataaacttatcaattttatgtaaaatacataaattaaatatataaatattatataaataataaaagcggagaagatactaaaatattttctccgctttattgatatattatttagatattattcaattgaataaataaatttatgcaatcaaatttaaactaaactattgatatcaaataaaaatttaaaacaaaaattaacaatattttttatataaataaattaagttttaaatataaaccatataaaaactaattaagcttatctgcatgctgtgttaaacgagttttgaatttcctcacggcagagaacttaactttctgataatcatgctttttcttcgacttatgtctttgatttttcccaaagttggattgtttactttttactacgtcaaatcggccaaagtgtaggactaccactgaatcacctgaacttaggtgatctgctatctgatcgaagtaagtagagattatgttaggaagctgatccacagacacggtggtttgcttttctcttttcattttcttaacaagttcttctgaaatttcacgccctgtgaatcttctatgaccattagttatgttgctcatatttatccctcttatttttatgtttttcgattcattttctgtttttaggttacaatttcagaatttcattttggatattgcaaattaatcattaattttagcgaaaacactaaagtacttagaagtagagcaaaaacaaggtgctttcataataaaaataaataatatttgacaagcacttgagtataggatttatctatacattaggacaaatttgcaaaatgaataataagtgcaataatatatgacagataatatagaaagatattgttatgaatgaatttgaagatattgattttatgttgaacttagttaaggaaaagttgagtaatattgacagctataatatggctttagcaactatggttggtacatattttgctcataatcttcctgacgaagataaaaagaaggagatagtattggcagttaataattgtcagaaggccgctgaaaggccgttaaatcatcagtttgacgtttactttagaaatcagcttttgggattagtcgatgataaagaaagcaagaatcaattaattaggattttaaagaaatcttcaaggtggtaaatatgttagttaatgaattgagggaagttaaaactttcaaggttgaaagaaccgtccctttgaaagtaatttctcagtataccaagatcccaattgtaacattacgaaaatggatagaggataacgaacggttagataaagcacgatatacgtcaatccacaaaatgtatttatttaaacttcagtatgattactatttaaatcattttttagattcatccatttccttcgaagctgtacttaaaaaaggggtcataattgccgattccgataatgttttaaggagcgctaagcttttattagacgaaaaatacttatctaaaagtaatttttctttgaaaaaaattagcgaggaaacttgcattgactattcgttgcttaaacggtatcaaaaagatccaataaagttagagacgatagcatggactagagtatatcgcttagctaaggctaaagaagctattgatatggtagatgcgttttctgatgcaatatttaaaaggatgcttgataatgataattactgcggaagacacagaacgtaaaaagtacattctgaaccaattagaaaaagattacggtaaaaagattaactggaaaaatcagtacgataatatttattttttgcttactgatcttgaaaagcagacaaataaaggacagatttcaatacctattattgattttagaaatttacgtgtttatctagccaatcagttagatttttatccaaattatccatacgataaacctgagccaatggcagcagggcttcatagtgaagaagcagcagagaatcatttctttttgcatcccgaaacctatgggcgattacctaactatgatattgaattattttatcgagctttaacatctgagacgattctttatcaagaaaaaagtaaacaaatagaaaaactaaaagttttgcctgaatttctcgcttttttaaaaaatagcagtttaaagcatttatcatgggtttttgcttaaagagggtataagcggtgaaaaaaggtacaaacttaaggactgtaagtgttattgctttagtggcactatctttactaggaggttgctcacgaacccgacaaacaactaatcctcaagaagggtatgattcagaagcctttcatagtactaaaaatcaaaaaagtcagcttcaaaagaatgtaactggtgttactaactcagactatactgatttggctcagctaaattttaaaagtggtgaaaaatcttattgctatgtaaatcatgatcgagccaagcttaatccctatgattggaaaactaatcatgtgatttatcagcaacctgataacctaaatcgcacttcagcatctaatgtgggatacttagaacgaaggaatttagctaatggctcattgcgagttagacagtacatacagcctagtggctggcattttaatcacggcaagcaaatttataatcgtgggcatctaattgcttattccgtttcagcggggattaaccagcaaggtcagtattctcctaatgaacaatcaggagaccaaaacaatcctaagaacttatttacacagactgcatatacgaatcaaaagattcaaacaatttatgaaaataaagtgcggcaagcactgcgacaaaataaaaaagtaatatattcagctaccccaatttttagaggaactgaacgaatggctcgtggaattgacttgcaggcaattactactgacaagacattgaattttaatgtttatatttttaacgtacaacctggctatcaatttaattatcaagatggtcgagctagaattgatcatacttttaaagtcgatgggctatctgattatgatagcaatgactggaataaaaattataattctacattcaaacgtcatttaataaggagtagaaggtatctgaagaattattgggatgattatcagcattatcaacaaaagagacaacatctgcagcgatatgcaataaataaagaacgctaacgaaaaagcattatgataaaaagagcgccacatttataatggcaatgtcattaagttaaggcattgacttttttacctaaaattaacttgattagtgggcgtttatttactttgaaagtctatcctaaaacttgacaggagggattaatttgagcgaagagaatcaaaagaagctgtttggcatctcagcgattatttgcattattttattaacgattacctattttggtgatttagccatcagcaataccttaattaattatcacagctgggtagggacgttttgtcagacttttggcgagtttccggtttatcttatttttgccttatgtggacagattacgatgacttatgcctggaaaggcgactgtgaaaagctgctgggggcaggaccgttgtttgttggcgggcttgcactgtcgctttggcagagcaagaagtatgtcaatgaattcttgggctatctgtattcggtacaaactaaccttaaaaacggtaaggcgatagcaatggccaacagcgactcagtaaagggcggttatgcaggctcaatgattataatggtctggctgttgtttttcgttatatttacgctgttggtacaatggtggctgaaaaacaaaacgactaaacagctgactcgctatatgaaaattgcgattttggcgtcattgacggtttggtttgcattggaagttaatctgaccttaaaagacctgtggggacgctatcgcccatatgaactcacgatcggtaatcatgaatttaccaattggctgacgatcaatggcgttaatgggcataagtcattcccatccgggcatgcgatggcggcaacgttatgcatcgttttttcatggttcgtttccaacaataagcgtaagatctttttcattggtggcatcgtttatggtgtcgtgatcgctataagtcgagtaatcgtgggcgcacatttcctttcggacgttacgttctcgtttttcctgaccgtactgatcatctttatcatgaatggtcttggtaaaaagctaattgaagatttttaaaaattagggctgtgaccatcgaaaggtgaccacagcttttatttatgtgttaaaagtcatgagaatacgccacctttgataaaatttctaatcaaagatagcgtaaagcggtttcaaaaattaagcaaaaaacactcatcaaattctgatgagtgttctaagacgttctccgttcagagtcaatgtcttaacttaatgacattgtttataatgggtggcgcttttgttgttaaaaatgtttaaaaattaagattctatgttttactttagaattttttgttggatattgtatgtcatttgtcatacaatatagctgaggtgattattatggacgcaagagtaaacagtagagtacctgtagaagttaaagaaaaagctagtaaggaattagcagatcatggtttatcaatctcaagctttattcgcatgactttatcctctgtagctaaagatggatttccaaaatattggggtattcctaatgctgaaaccatggcatcaattaatgaagctatggatgacataaagaatcctcatctaaaaagtgcttcaacacgaaaagaattggaagatttattagatgagtaaagtaattcctacaagtcgttttaaaaagcaatataaaaaggtgaaaagaaattctcattggaacaaggtttttaatggcaaagtaccttttgagggagataatcgttctccgtgggactatgtaattgattgcttcttgaacgatgaggagatacctgaatatttctatgagcatcccattacactcacaaaacagcagcgacaagagataaaaaatagatttaatgattcgctcaatcttgaaattgaaggactagatttatattttgatgggcataatggtgatcatttacttatttacgttagaactagtaaaaagataatttacttaactaggattggtacacactcagacattttttagaattaaaaaaggccagccaagattaactctcggttggtctttttagttagtatagccacaagaaaaattacaataattattactagtaatagattaagctctatgcttacgtgatgctaagaagcctaggcccaatgctgacaaggcagaggtaaagcccatgatgagccagttagctggtttgttacctgtttgtggtaaagcaccagtactgcctgagcctgagtttgatcctacagaaccattattggcattaccactgtcgtttgagccattatagctttgagtattgccaccattataattttgggcattcccgttgttagagttttggctttgtgaattttgaccattggcattgccattactattttggttttgaccgccggctgcagctttagcaccattcttagtgtaaactacattaattgtagtatccttggttaagtattcgtctaaaccactagcaagcttagcattgccattaagtgattcaggagttgataaccagagatattgaccattaatgttagcaagattcttatccttaagcgtatagcccttaattgttggagcagctacgtcttgcaacttgtaagctgggtcaactaagtttgaacgattgccattaacttcaagtacgatataaccttgaaccttagctcttctgatcttttgaattgcactgttagataaatccttttgagcagttacaggtgaaagattggagtatgtagtagtcttatctgggctaattacacgatagcggtatggatatacgtgaccaatgtgacgcttcttaactaagatttcacgattaatagtttcaaccttagatggagcaagcttcttaccgttttcgtcaacaaagttgatagtacgggtgattgggcctgaagctacaacatcatagcctctaacgccttcagtccaagttggatatgaccgcttatatgtaacatcaattactttgtttctgccggccttggcagtttcggcaggaatataagattcagatgctctgtaatacttcaaaactggaaccgtgtattctgcaaaagtgtgtccagccttggcagtttgggtgatacgtctaattgtgccatcaggttcatgtaaacgaatagtacgtactacgtcaacatctccaattttacggatcttaattggggtacgatctttgttcaaaatgtaatcaattgtagttgcaccatttgaaacggcaacatagccagttggcaaggtaatggttacgtgatcaccataatgtccttcaaggtgtgaggtttgtcctaaaacgttaccattaatatcaaccagatttacagtacctgagaaaacttctgctttacttgcagtagtagataaacgttgtgtagttacagtgttatcagcgtgtgctgcgggagcaggcttaacacttgctcctagaacactaattaatgtaacagcgcataatgaaacgataatttttttatgcattcgtatatgcctttctttcttacaaaaatttgtttacagttttgagtttataagaggtcgcatagcaacagctcttttgcaaagttaagctaaattttaaaaagggcttaattagttaaggctctaaaccataaaaatttagaatggcaaatcgtcatcactaatgtcaatgctatcagttccactaaatggatctgatgaagcagaggtattgtttgaattggaagcattagtattggtagtctgattattagcagggttattttgcttagttggcgttgaggcagtggtctgattattatttgaatcagagccagtattttggttattgcctcctgaactagaatcattgcgattgctgcctaaaaaggcaaattgatctactacaacttcagtagcataaactttttgtccatctttattatcataagtacgggtctgtagacgcccatctatgccaatgagttgtcccttatcaacgtatttgacaaaattctcagcgctttttcgccaaagaactaatgaaataaaatcagcttgccttactccctgtgagtttgcatattgacgatcaacagctagagtacattgtgcgacagcaattcccgaagaggtatgtcgtagaattggctttttggttggtctgccagttaagattacacgattaatcatttttttgctcctttcgctagaaaaataatagcagtaagcaaaaacaaagtaatatttgcaaaaaagggtggaaaaataccattttctaaatataattagaattttctaaaattaaatagtaaggaaagtaggtgggtaaattgattactggcagaaaaggctctcatagcaatacagcaactaatgatattatttttgataaagataaaagagcgatgattacgtcattggataagcgtcatgaagcacttatgcgtgataattcaattcttaaagcagttacaaacttagtacaggggcaaattaatcaagacagcgtaacaactgtaaataagcacagtagcaatgcaactagtactgctactaagaactatacttatactcaagtaaagcccaaagtagaggagcaagataatacttcttctttgaatttaaaacacaagattaaagataatcccagcacgtctttggataaaaaagatgttgcagtaccacaattgcctaatattgggcagggacagaggacaatttcatatcatagctttcattttagttaacagttaaacgcaggttaattttaagcatcatcgggatgcttatttttttgcaattaagtaagaattagcaaaacggtaaaaagtcgtaaaaatcataaactgattattgatactcaaagaaggtgaaaaaaaatatgattaaaaataagaaattgaagtcaatgattcatcgttttcgcagtaaaaataatgaatctaagactaaaaccaaattttataaccacgatgcagatactagccaaatgtcagctacctatgaagaccttaagaaatatggtgtaaatcatgagcttaatcttattaggagaatctcaatacagcaaaaattaaataagtatcagcatccctcttcaaatcatcgactgcttaaaggctatcgagatacgggagaatggcttaactggattggaatagtggcagatattagcatgccaacaactagttcattagacggtaaaattttaattgataagttttgctacgagaattctctgcatcaagttaaattgcttgattatcacgtctggttaaaaaccaatgaaatacgttatttgcttaatgccgataaacaaacaattggagtaggcgatacgattcgaggtatcagtaaagttactaaatactcaagcaaaggcttatcaaataaatatgggttaggtgctaccctactaaaaggagcgggtatttatgtatcaattcctactaagagaacattagctcaatctactgctaatcaattggttactgattatgataggcaagatgattgggtggttaaattaagtaatgcaggtgtccctaaacaaactttaagagattatcatcgagaaaaagatattaatgtctttattgctaagaatagaggacacgttagcgctagatttcaaccttctcgttataatcattattttgaaaggctagaagcgatgcctcaaaagatactgcagcatgaaaaagaacagcatagcttggcaagccaatattatggaattgtagataactttaaggtttatcaaaagaaagatagttgccatagcgtaatacatttctcgtatattgttgatgatattaaacggattattacaggcagcaaatggtttgagtacgatggtgaaattcttaagctgggtagccttagacctaaagacgtaattggttttaaggacaatagagacttaattaaaagttcagggactttagagccactaacgaatgtagaactgttaaccaaacatcagagtgatccaatgcctgataatcagagtttagtagctggttgggtaattaaaaattttggtaaacaaaaaaatgttttaaatcaaaatgatctagttaataaatatgaacgctggctcaaaactaaaaggggagaagatattagaactcctttcaatattggcttttctattgacgaaattgctgaaaaaaccacggttactgctcatcaaattcaaaaattcttggatcagcattcagtacagccaattttttctgaaggtaacaaggactactatgcaaagcaagatatggatttaaccgttaaacactttaagcaggttcataacaaagcaaaagcagctttacaagttgttcgtaaaactaaggataactatttaatcgataagaataaaaagcaagaagaggtgaaaaaaatgacgaataaagataattctgttatgaatactgatacaagtaaagcaaaaactactaaggctcccaataatgaccatgtaataaagattattacttcacgtggcagatttaccacattgcaatttaaaaccctacaggaagcatatattgtacttcagcaagctttacaatctggatacttgaattacttcataaaagccaaagatgaagcaggtagtgattgtttaatatcagttaagaatattataagcatgagctaaaaaaacgtgaccggcctaaagatgatcacgtttttgcatccataacataatgtgatgctgatgtatttttaatgcaaacattaagttttctcggattccactccgaggattagcctatttgactaatcattagcaattataactaattagtgggcgtaataacgaaaggtaaatagcaaattgaatcagcgagaagaatatcgaaagtataagaaaagaatagccaatgcgaaatattatcaaaaaactgttggtactactcaggggttaaaaaatgaacgcaataaaagaaaaagcaaggccaaaaactttatttttaaggaagcagattatgatgaattaaaaatgctggaacgagcaataaagatgcggcttagcactatgcattccgactaaattctgagtgcagcattatagccaaactacacagaatttaggagctgaagtattgtaagctaaatgctgagatgtactgctcctaaagaaaataccaatagcttaacactaggggctattggtatttttgatttaagaaattattttttgtgtacctgaatcagtcgaaaattctaagatcaaactacacaaaatttaggcccaaaggttaaaaagaaagaggacaatagttagaaaaatagtaacaatcatcgtattcctatcactgtgttcagtatcttccagtacttcttgttttgtcataatgcagcctttctaagtaatatttcaatttgttactgaatattgctaaagtcaaaaactagtccgatgtcatgtatatgtaactgtgtgttgtaaaagattttattgacttggcagattttagagtattctttagaaattcgattatgaacgatgactagtggctgaatatcttgcttaattttatgcatagtgttttgccattgcttaatgcaacagtctttggcccgtgtttcataaaataatttattgtgtgtcaactcccaaagcattcgttctaagcctcttaccggacgattaggtagttccttctgagctaggtaaacagcatatttattagcataattataaataatttcagattgaacggtgtgcagtgtattagcttcagcagattcatcatctaaaggttcaccatctaagtttaatctggtgtttcctaatttaataatattgctcaaggatgtgcttaacttagtatttccttttttagcagtatcttttaaagcccaattgattaagccaatgaatggccataaagctatagccttcatgtttttttcgtattcctttacttcatgggtaagttcttgttgactaataggtttaagttcaggtgccacagcttcttttgctttctttttggtaatttctgattggtattgtgttctagtaagtctttgatcaaccatttcattcctccaccttgaaatacttatatgtaaattagtgtaagtggcaattagtttgcttaggaatttgcaaatatgaatgattattttttgtaaattatttagatatccaaagaatcccatagctaaagtaatttgatataattgtggtagttaaaattcgaaaggaagaataataaaatggcaagtaaaagtgatttaattaaagcagttgctgaaaaggctgacctaacacataaagatgcaggattagctattgatgcagtacttgataccattcgagagacattagctaaaggtgaaaaagtacagcttattggctttggtgctttcgaggtacgtcaacgtgctgcacgtaaggggcggaatcctcaaactggtaaagctattaaaatcccagctactaaaattccagcctttaagcctggcaaggtattgaaagatgctgttaagaagtaaaacatgttaatagcacgcgtggtgctagttaaatcgttttagttaataaaaaagtccaatcttgttagactcgacttgtataataatagaaaagagtctgatctgattgaactgccttaagcttaagcgttttagccaccatttacaagttagttttaaagatttagtgataatttgtcggcactggtatcgtttgtatgcaccggctgagtttactcatcggcgaaatattgatcaaattaaaactacggacagtctgattttggctttacttatctggcaagctaagacaggaattgaatcacaaagaagattctgtgaatgtttcaattgtttatcacactcacgttttaatcggcgttcacgtcagctattgcaattgatttatcagatacggcaagaaatgaataaaaaggttgacctgaatggacatttcttgatcattgacagctttccggtacctgtttgccaaccaattcgcaactatcgtgctaaaatttttcgcggttatgccaacattggttataaggccaccaagaaaatttacttctatggtttcaaagttcatgccattgttagcgatgacggttccattcttgattatgtcgtaacaaaagcatcagttcatgatgccaaggagacagttgaactgctgaaaaatgcccatccatctaattactatcttcttggcgacgaaggctatttaggcaaagaactgcatcaacagctaaaacaaatgggttatgaactttggacaccatatcgtaaaaatatgacaggagctaaaaagcacaatgatcatcaattgatggctattcgcagaacaattgaaagcgacttttcgcttctgacctattataatgccgagaacaatcgagcacgtagtctgataggctttcaaagccggttggaaattgcaattttagcttataatttggcttattgtctagaacgatttaactagcaccacgcgtaaaagagtattcaatttgattttttattgtcagttaaagtacaattaagttggtagtagatttttaagaaagctgaatgtaagtatgaaagagtatgaattaaataacacaaaaatgatgggggggggtaaagcccccgttacgaataaagttattgttgcagccgcttttgtattacaaggatataactggaagaaaaaagatgggccagggccactttgatattgaattgaaatgattaaaaacgtaacaaatattgaagtggagtggttgctatgcaaagaagagttttggctactaaagaaagaatctattcaagcataattgaagaattaaagaaagctccgttaactgaaattactgatcgtaacataatcagtaaagcacaggtttcatcggggactttttataagtatttcagaaatcatacagatgcgctcagagaattagagaacaatttattaaaagattattcattcgtgttgaactctgatttaaaatattggcatgttgagaaattaactatggatagtaattccgtgaaacttattcaaaacaatttgaataatacgtttaaattttggaataaaaacaatgactacttacttgttttggtttcaaaaaatagtgacaaatatttctttgaccagttaattagtgaaactgagttacagaacaaaaaaatactagctaagtgtaaaaccaaaaccaagataaaaattacatctgataaattaaaagtagatgcatttgcacatcaattagctgcagctgaaattgagtcattcatttggtgttataagcatttagattatatgtcgagaaacgaaattaaagaggctgtagcagagacgattactaatgctccgtttaacttaattatgcagaaaaacgtagcataaaatttataaattaaatggtttagacctcatatttaagggtttgaacttttttcattaggacaaatttagattgattatgaaagcaaactttaatattgccacttacatttttctaactaacttgactttgagagtatatagtgtaagataaggatgtaaacaataataaataaacaatatacaacaaccaatgaaagtcaagtcaaaataaataatcatttagacttaattagagtgagaaatcgctcagttggaagaaaagagacctttgttaatataaagatctctttttttgtcctaaaattttgtataaaaaaaccacctttgtatgggtggtttaagggattaggcaatctgattataaataattagattgctataaagagactgaatatgtagcaactgctatataaaatgtggaaaagcatggaagaacataaaagaacggtattttccatgccacaaaggtttatatttttcctttccattctatattcgccaccgtcaaacactggtattccgatattccaactagggagcaatcgcattgaccagctatgatggcatcgttatcggccatagcctgaccgtggattttttataatgctttgtttaattcgggatgactgatcaacagcgtaaggtttttcatggcatttacgtcacggtcaaccgttttgccgtaattagggcaagctggattgtaacagatatactcattgtgctttgtcccatgcttctggttgccttttaaagtgatcttgtcagcgccttttttgaccgtgccacagaccgcacatctttgtgttgatggatagtgcttatcagctaaaatcagttctttaccgtaccaagcacatttataagccagcagttgcctaaatagtccgaacattgatctttgcatgcctttcgaagctacatgactcataagcatcgccttaacgtctaagctttcaattacaatctggtcatattcatcaaccattttcgtagtaaacttatgcatcaagtcacgctgaatattagtggcacgctgatagcaggcttgaagcttggttttcgtcttcaagtatttattgctttgcgttcctttaattctaccgttgactgtccgctttttagctaaacgtttttggtaaaacttaattttaagataaagatgctttagcgaattaggtaaagtcaagcactggccatcctgataattgaagtggccgacattgacatcaattcctgttcctttgcccgttctggtttttgataaagtgttttctagtttgtatggcacgcaggcataatatttatcattaattctaacgatggatactacgccaattttgcctgatagtggcttttctgaaagcttgatgccagtccaatcatctttatagggcgtttctctcggcatttcaagccaaagtcgcccatctttgatttttgctcggtcggttttaaagccttgccgtggatttctcttagaacggaactggggcttgccccaatcaggctgagcctgattaaagaagtttttccatgccttgcctaaatcttgaaccgccaattgtaaagtacgggcagagtaggcatattgccagtcgtttttttgttcaatcattctgtctcgtactaaacgccagttaggactaggattcaggtgctgatcccgatgaattgctttccatttttcagtctttttatcttgcttagggataaaaaccgtggcaactactttgtccaagatagtatgagccatatataggtcttgccataaagccaaagcctgattccagcagtacctgcgatagtcgcaccaatcatctaaaacctgtttcatggtctgattggggtatatctgatagattcgtgtcttcacaatcatttttggtttagctccttatcctcactaattttatgcttatatttacgcaaaccgtaaagtcggcacgaaaatacatgcaagatgcttaggacatcctgcctggtttaaatcgatcacgtttgacaatggctctgagtttgcggatatgaccaagatcaaaggctgccagatctacttcgcccacccatattctccatgggaaagaggcaccaatgagaactgcaatggacttctgcgtcaattcttccctaaaggcaaaagcatgaaagataagtcagctgcttatgttcaacaggcaactgatgccattaaccgcaaacatcgtcgaatccttcaatatcacacagcagaagaactcttcaagcaatatatttcctcatagcctaactgttgcacttaatttgacaattcaggaaataaaaatcatacaaaatttcttaggtcagttattggtttaaatattctaaggtttattatttctgttctcacttgcatagcagtaattaaagcaactagactattgcttgattatgattctactcctagtcagttaaaaaatacggtaacaaaagtcatttggtcgatgttgtcaattttgctaatgttttcgattcaaaccatctcagaaattattaaaaagcaactatcaaaggagcatccctactggaataagcttaatcttttctggaatacgatcattattttaatagccggcagcataattatgtactatctaataagcattgggcagagcgtcaatgcaatcattttagcgatcacaattctggttttaaattccatgatgatcagttaacccattagttgctacttattcaatattgctactatcttatgtggcttaacgtatagcactctttctcctgttgaaaggattacgtcctcatgccttaatctagtattcttataatctgttatagttctgaccatcggtaaatattgcttaacctcagttccatcatctaagacatagcaactgcatagctgtcctgagcttttgccttgattaagttcaacaattggcaacatagtatctgcgttggacttcagaataggaaccaattgcttcaatacagtaactatattttcaccttgcttaaacggatacggaatccaatcggtttcataattcttattagttgccttatagtcaacagatatcttagtttcttgcttagcgtcattactttgtcttatttcttgcatgattaccagattatgatcccagctcatgtatttttttgagctaaagtttcatagtaagccatagttttccttcaccacatttctttttcaaaattgattttaccataggcagggatgcataaaaaaattaggaagttgcataaattctatagtggtattatttccaaatacctaattttaatagcattttacttttaatcttatgttaatggtatagtcagttaacaattaaataaacctaaatcaaaagaaagaagacttggataaagctgtttatgagagtaaacagaaaaacaatattagaaatatggaaattgagcaaatttcagaactgttggtacataatgctgattttattaccactgtcaatgagactgtcaaatttttgtgtaaatagatctttccctgaattgtcaaattaagtgcaacagttaggctatgaggaaatatattgcttgaagagttcttctgctgtgtgatattgaaggattcgacgatgtttgcggttaatggcatcagttgcctgttgaacataagcagctgacttatctttcatgcttttgcctttagggaagaattgacgcagaagtccattgcagttctcattggtgcctctttcccatggagaatatgggtgggcgaagtagatctggcagcctttgatcttggtcatatccgcaaactcagagccattgtcaaacgtgatcgatttaaaccaggcaggatgtctgtcaatctcattttgaagcagcctttggcatgtgcttgcccgatagtcaggaatcttgataactacttcaaagcgtgtggttctttcggtcaaagtcattaaagcaggctgattcttgcgtctgacgcctttaaccagatctccttcccagtgcagcggcgtttttctgtcttcaatctctttaggacgctgttcaatggaagtgccaagattcttcttgtgcaaagcatgaccgctctggccgtgatgacgcttgttcctgcgtcttttgagcttcataggcagatcaatattgcttatgtccagcaagccctgatcaatatagcgatagacagttggtgtgctgggacaagggtagcctggcatagtccttttgaattcaccaacgaattcatcgatgctggtggcatcaaatttagctttgaagcgtctggagagcattctcaaaaagacagcataatgcttcaatggattgcgctgatagcagtttttgcgacgcttctcataataaatctgtgcagtatcagcgtaatagtgctcatacaataaatagctgctgtctctttgcaggacgcttccgcgtttgatttcgcgactgattgtcgacttatggcagccgacttcttgagcgataacagtacgggaagttatgccggaatccagcattgcttgaatttgtccacgttgtacgctggttaattgatgatagtgcttagaaatgctagaatttgaattggtcatgaagatcttcctttcttgatttttcgtcactttaagtttaggtcttcatggcctttttgtttaacacttggtgttgcacttcaattttaaatccgggatgatttttatttgatgccgtaactaactttttattttgcttgctcaatgtattcacgcttcctattgatctaataaatatagtagaaaaaatatgtttgtaatctaaaattacttaattaggtgctaaaatgacgaaattctatattaaatataaaggaaaagaatattttagagctgaagacttggctagagactatggagttaaaacagaattagttagagacagatatcattccggctttagagatcctaaagcattggtaagtaagaataaattaatacgctcatatactgcaccccatgtgttgagctataagggaattcaatatgatagtcttaagtcttttgtacaagagtttgggttgaattacgcaactgcattagcatgctggaaaagagggattagagagccagcagatttgatagattattgtcaatataaaggcaaaatcaaaactctccgaagtaactcaacaaatgatcaatttatgattgaagaatttctaaataagcacgatttactatcgccaagacaacttggtcacaaaacaggattaagtgttaatgttattgctactcagttaagcaatattgtacaagatcatagtcgaagcggcatagggcttaagaaagaggatattgctaaggttaagttgacacagaacgaatataatctattgacatcaaacgcaagattattacctaagtatgcttttaaaaaattagcagttaagcatattttggagcataaaaagaagcaagaaaaccaatatctaaaagtatttccttattttaatggtaaatattatgtagatatgtcttttggagaggtgtggtctaaaaatcgtggtaaaaatacttttcgcaagataaaagcatttagcggttgctatacttttagggatgctaaaggtaaacgatactcatttctgaaaaaagatgtcttagacatagtgaatcatcctgaaattaaagcccaagacttgataagtcgaaaagaattatttgaaaaactaggttttactaagtccttgtgggataatcgaaaattgtatagcttgttaccatcatctaaaatgcatgtgagacttgatggagatgggaagaaggtaatgggttggttaaaatttaacgttactgagctaattaatcagtatcctgaaagattcaagactaccaaatgattagaatcctaaaaccagatgtttaacttactatcaaaggaaatattaaatgcaaaaattaagagaaataattacttatgtttatcctaaagctacatcagccgaaatgagaagtttaactgcaaacattgatcgttttattaatgaggaaaaaattccgtttgtcaaaaaaggaaatacacggtacttcgacttagaagctgcttctaaaattcaagagaggttgagattaattacgatttgacgaaaagaaacaaagaatgcatcccttgaaggcgatacgattactctgtcaagattaattgatacgaatttttctgtagaaacacaaaagcaaaagaatagtttgaggacaattgcaaataattacattcacgacaatggaatttgatattcagtggctggtagaaatacaattatcagtactaaagatgaagctaagatcgtagaacgtttaaagcaagttcagcagcaacccgttaatccatctactaaagcattaaatagcaagcacaaagtttccgaaattccatcttatgatcaattactagagattattgctaaaaaagataagcaaatagatagtctccttgctagacaagaaaaaatagtaaaaaaactggaatcaatattaagtaactaaaggaaagtaataatcatttttagaaaagaggcattctcgatgtaatgagttatcctgagattaaagtccaaaacctgataagtcggaaagattatttaaaaatttctaagtccttataggataatcgagaattgcatatagtactttttttgatagttaaagaggaaaaatcaggatagtatggaagatagtaaagatgagttatacgtgtgtccaggtattctttttaataaacatgataaaaagattaatgactttttttcaaaaagaagttggttgctagtaataattagtttatgctctggagtcataagtggaatggctttaccaattaatactcagtttcatggtttagcattattaggtgcctggcttttagaaatattaagttggctagtttggtttacgactattggaaaattaagacctcagtttttctgggggcatttaaatcctaaattatgtatgatgcatcccatatcagaacttcaaaaactcgttcaagaacaaaaagttcaagaattaagatttcagaagaccaataagcaggaaaagagcaaactaattttcttattatttcttcaaattgcaatcgtactgtggatgagtgttatgaatcaaattgatgtattaatgttgatcggcgctgttggattatcaggatatagcttgttttatttatggctacgaaatttgttctccagtattgatattgaatggggaaaatttaaaaaatctaattaaagagaaggtttagcgaatgcaaaattccattcgctactacataaagcagattaatttagtctgctttttttctgtcttcaacttctgaatacttgaaaatctgctacatagccgtttcctgactgttataattactaatatagataagcaaataaagatatgtagaggataaataatgacagaaaacgatagaaaatttgaggctacaacaccaaactttaagagtgaagcagcaaagaaaattgctaagctttttccagaagttgtagctgatggtcagattgatactgatgcactagaggaactactaagtccagacttagaggatgaagaatcaaatgaaaagtatgaatttacttggcgtggtaagcgcaatgctaaacgaatagcagacgctccagctcgtactactacattgattgctgacaagaaaagctctaaggattgggatgcaaccagaaacgtttatattgaaggcgacaatctcgaagctttgaagctgatgcaaaaagcatacagtgaaaaagtaaaagtaatatacattgatccgccttacaataccggtcacgattttgtttataaagataaatatcatgatccttacgataattatcttagagaaacaggtcaaatagatgcagaaggaaatgtgactactactaacagagaaagtaatgggcgctttcatactgattggcttaatatgatgtatcctcgcttgaaacttgctagaaacttattaacggatgatggggttatctttatttcaattgatgacaatgaagatgctaatttaaaaaaaatttgtgatgagatttttggcgaaaataactttttagcgcaagtagtttgggagcgtgcttatgcgccaattaatttgaagaagaatttctcagaaagccatgactatatcctggtttatgctaaagatgcatcaattgttgagacacgtggtattcctagaggcgatggggcagataatcgttatagcaatccagacaatgatcctcgtggagtttggcagtctgataacttatctgtagggccagctattgagtcaaatatttaccctgtcacgactccctcagggagagtagtagagcctccagcaggaaggagctggaggctctcacaaaaagcttttcgtgagagactcaaagataatcgtatttggttcggatcagatggaaatggtgtaccaagaatgaagagattcctttcggaattaaaaaagcctggtattactccaatgactatctggaaatacaaagaagtaggacatagtcaagaagcaacgcagcaacttcaaaaattaatgggtggaaagaaatactttgattatcctaagccggttaagttgattcagagagccgttcagctatattcagaaaatgattcgattattttagatttcttttctggctctgctacaacggctcagtctgtaatagagcagaatgcggaagacggtggccatagaaaatttattatggttcaattacctgaaaaaacaagcaaaaaatctgttgcctataaggatggctatgagaccatacctgaaatagctgaagaacgaattagaagagctggcaagcaaattcaagagaagcattctgacatcaagcttgatactggtttcaaggtattcaaactcgaaagctctactattaagcaatgggatgataatccagataagttcactgaacagctagaaatgctacatagtccatttactcaagactctacgaatgatcaaagagcgttagaaattgctattaaaagtggcattagtttaactgcatcccctgagattgacggtgataattaccattttgtatcagatgataaagaagtatttgttatcttaggtaaatatgatgagaaacttttagatgaattagataaggaaagaaaattacctaatgctactgcagtaatacgtgaaatggacaatggctcagaaactaaattcaatttaattgagaaaatgaagcaggagccagaactgaatgatcattttagtttggagtggctgtaaagatgatactaaattacgaaaaactaccatatcagcataaagcagttaaagcagtggttgatacattgtctgatcatgatgatatggcaaatgaaatggtacttgaaccagaactgctcgatgagtcggtacaagcgactttattagataatggccaaaaatatccaggtaaggattatctaaaaccttttccgcaattcaatattgaaatggaaactggtactggtaagacaatggtatatttgcagacgattatggctttgcataaacgttttaacgaaaacaaatttgtcattgttgttcctagtagagcaatcaaggctggagtagaggatagtctggataagttaaaagtgtatttaagcgatatttacaacactgataagtatcattactttgtctatgattcaaagcaaatttctgaattgcagaactttgccggcagcagttttgaaattatgctgacgaccgtacaagcctttaacaaatcgactaacgtaattaatcaggaatataatgaaggcttctttggtggcaaaccccttgatcaaattagggatgcacatccaacggttatcattgatgaaccacagtctgtagacggagctaaagctggtaaagaagcaattgcttcgcttaatcctaaagtgactttacgatattctgctacgcataaggatcgtcaatacccacttttatttgaattttggccagtacaagcctatcaagctcatatggttaagcacattgaaactttaggtacggaagtaaatactaatggtaatgtagctttcgttcagttaaaggaaaagcctgtgccagtgggtaactcacttcaggctaaagtagtagcttacaagcaagttggggatgaatacaaaaagaggactatcaccttaaatcagaacgataacttattcgaaaagactaggaacccacaatataaatcttttggccacgtaattgaaatcaatagagcagatgattttgttgaatttgaaaacggaaagcgggctactttaggtgataacgaaggcgaagctcaaatttggattcaatcacaaatggaagctttaatcagagatcacttggatcgtgaattagcaatgcaagatcaaggaattaaagttttgtctttaattttcttagatgaagttaaaaactaccgtgtttacactgcagatggagctaaaaagggtaagtatgctcaattgtttgagaatatttatcaaagagttttacatagcaatcctaaatacaaaaagctttataactataacgttccagtagatgaagtccatgatggttatttcgctcaagataaggcaactaagaaaaagccagctatgtaccgtgatactaaaggcgatactaagaaggatgaaactgcctacgatgccatcatgcaggataaggaggggctgctgacacaatacatccctggtaagccagaaactgatactaaagctgccaaacttcgtttcatttttagtcactctgcgttaagagaaggctgggacaatcctaatgtctttcaaattatgacgattactacgcctaaaaatgatcttacacgtagacaaaagattggtcgtggactacgtattcctgtcaaccaaaaaggtgagcgtgtttataacgataaacagaatgtcgttaccatttatgctagtgagacgtttgaagcgtttgctaatggtttgcaaaaggaatatctccaggatggagttattagcaataagattgacgaaaacacttttgccggattaattattgaaaagaccccttctgagcaagaagaaaatgataatgatattgcaatgtcaagctttggtactgtaacagatgttgcggaagaacaacctgagaagccaaagataatgcataaaattaccaatgaggagtcagatggtttcgctcatgttttacaagagactaagatcactaatagccagggagctgttaccaacacagggatgcgttctttgactcaagaaaagaagcagcaaattattaaaaaggcaaccgaaaagggtattaatcaagaagcagcttcttcaatgatggattactttgctaagcagtataaagctccagtaattgaaaatcggaaagaaaaagagaaagttaagataatcaatcgagataatccttatcttgatgacctttgggagaagattgccaagaaggtaaattaccgtgtgaagtttaaggaaagcgctttaattaatgatattgttaatggagataatcctttagcagacattcagctcgaaaaaatgacagccgtacaaactagagccaaaattaatcttaataaggccaacgtaactaatgagctgatttcaaccaatactgagcatttagagaactcagatttgcctattttggatattacaaggcagctagcagatcaagtcggattaactaaagaagctattatcaaaatgattctgaaaactaatgaaaagaagcatgattttattaggagcattaaattgaatccagctttatttgtacaaagagctaaggcaaacattaaggctcatgaaagcaaacttttaaatcaatctctagtttatgtattgaatggagaaaaatggtctaaaactgatttaaagccttttgatgcagccaagaatacattatggctagttcctgataaaggattaaaaaagactttgttcgataagatagctgttgattcagacgaagaacgaaagtttgcaaatcaattagtaaatgaagataaaatcaagtacttccttaagctcccacattggttcaaggttccaacaccatttggcaactataatccagattgggctattttagcagagaaggatggctcacaacgtttatactttatagcggaaactaaatctactttggatagaactaagctaagaaatgatgaaaatgccagaataaatgcaggtcaaagagcttatgaagctcaaggactggaagatgtcatatttaaggcaccagtggtagtagtaggaaatctcgaaatttagaagatggagtagtcaatggaaaagaaattgcaaccatatgagaaagagtttattgataaaactcggctagtcttggaaaagtttaaatcaatcaaagataataaggattatctttatgatctaaaagatgtgactggagccgagatttttaattttcgctctgttggtgatcacatggtggagcatactgagatactgaattttattattgtgccaatttggactaaaaattctgaatttttcgatgaaactaataattatacaattgctagaacgcagtttgaaaattattatgcagacagaatgcaaatcaagcccgcaaatatgtggcaaacaccattaaaattagcatttagctactgtacttatgattatcaaataaattcattcggcaaactcgaaaactatgtaaataaatttatttcttatgaatcagctttagagaaatttcaagattatagtagagaatatcaaaaactaatgaaattagtagcggaacataaaaaagaaaaataacataaagcctattcaatctaattgttggataggctttttatataaattttgctagttttcctttaaagcaaagtaaaactatggtggttccattattagccgtgaaattatttaaatttttatctgtgaacgtgtacttggatctaatttatctaagccatatatttgtaaaatttcgcttttaggggaaaagaagaacttcttaaacttatgctcggctagatatggtaagtcgatatatcttggaacatagtaagctccctgtggccagcgctcagtcatcaaaaatttatataatccaagtggaatttcgtttaaacacagctgatttacgaaattaaggggcttcatttttctagctaagtttcttaattcgttataaggtcttggccgaccagagaaaacattattaagcaaatcaattcgtgcatccccataagaaatgtctttttttattgctgcctgattaactgctcctattaagaaataattatgaatggctttagcatattggatagttaaccatcttaactgttcatggcttggtagattatctccatatagcggttgaattaagtagggcataattggagtatagctagaattataaacatattgtttagtatattgcggtaatacaatagccgtagctgctcttacacggtgtgggtaaacgagcaaaggtgtaggtgcttgctgtcctaacttagtacttctttgattgagtagattatatgcattaatgactgctactagctcatgctcttgtgctggaattaatatttgctttgtaacttttccactgattttatcagtaaacctcaatgtgcctaaactgcaagtgtcatactcatttcttactgagggatgcaagatttttttaaaagactggttgccagtattaaaaagtaatttcggagtttggagtagctttgatactttcttagaaactgtgtaagtcacattccaacgagtgtgtttggctaatctagaagacaactggcgcactgttactagctgatctgctaagtagttgctaccgagtaaaatcgaagcaatatctaaatgtgcttccgagacaccagtgatataaatatgtagattctttgcttgtcggtataaagcacctaaatagacacgtttgctttgatctgtattgaggtaagttcgtaagaataagctagtcatatttccaactttgcgtcctaagttggtgtaattagaaacctttcgtgattttagcgatccatcggtaatagcaatgagcatgctaatctctttttcctgatgtttaagtgcataccaaatgtagttcataattttttgaacttgagtttgattgctctctgtacgattatctagttccagaaagatttcgtgtttgcgttgattacgagtaaaggaaatcatttcatcagctacaaatggcagacttttgctctccgcaaatgtgtagccaaactgctgattgaatgaacgaaaatcatagttattaatgtcaaagctaggattgctgattaaatcaatccctcgctgagctggtgcatcttgtaaaggatattttagcttatcttgaaccggcaagtgccatttagcatcaaaatctgctgtactatgaattgattgataccaaggatcaattaagatgttgcagtaagctagaataattagtaagttttgttgttcagcgtttaactgatcaatgctatttaactccattggcaaacaaatattatctgcagtataagcttcaactctaatgaattgattaggataataatatgcaaaagccaaatgcttgttttttttctttaaatgttttttgtattgactctcatgtttgacatgagagttctttttgtcgtcagaattattgctattcaaaatgccaattaaactcgattgctggttaaacaaattatgactgtagctatcctgttttttctttcttttaacgatttttttaagtctataattcttttctcgtttaggtctgctggcaatgtagacatcccttttagtagctgaactagtatttgaagtcaaattgtaaagcaaattagggtacaaatcatttatgattaatatcttttgaaataatgtggtgattaagggcgacatgagggcgacatgagggcgacatcgggagacatatttaggactcttagaagtataaaatgtactgaaatcgttatttgactgtagtttagtcgcccttaatcccttgtaccacaaagggtagaagcagtttttagacactaagtttgagggcgacatcagggcgacataaaggcgatacttagtgatagttgattttttaattctttcatttctcttaaagactagctgcttagtagaattcaagaaggttaggattggaaaacaaattgccagtttgagctgaagtaattgctgaagtattggtagatgctggtagaacaattcttttaagtaatcggtgccaactcctaaatttgagaatttgttatgaaagcggacgctcttgatattagtaacattattggttttcgaactggttgtggcggtacttaacttagtactaaggcagcctctactgggtaatatattaatgcttaaagtggatgaactgtcgttggtattgatcgtatagcagtttagtaattgctgaaactcagaattaccgccatctgttaatagtccctgtagcttagtactaagacagctcatgtagttaataattctattagtaccagataagctaattaactgtaatagcttatctgtagtagcggtagtattaagctgactgatgtgaatttgcaccttttggctggcacctttatttaaaccattatggttggcacctgtaaccctattttggctggccccttctattaccccttttagctgggcacctctaagagccttagcacaataaaagtagtgatcatcagtatccgtgatatacggtaaataggaagaaagcggtgatttgccaaaggtagccgtataaatggattggacaatagtttcaatagcctgttcattgtgagagttaatagcagagtaatcgtaactgtaaggtaaaacattaatttcagctaaccatttacgtgcttgattggttagagtaatggtggtgtgaagcaatttctcctttttatttgtccgttttgcagaaattggcaccagattgcacaaaccattgtagctgcaccatttacttaaaatagatggtgacagagatgttggatattttactattgcagaccaaagtagattaagttgagcagtagtaacaaagccaaatattcctatgaagcgcaataattgaacttgctgtgaggttaatttcaaagcaacagtctttttggagtatttaaaagtgtaattaattttagtcatggtgaccccccaatatttaagttaattcagagttaattatgatactagagtaagacttaggtgtgctacacggaaaaatgttaaaagaagcttgatttcatgggcttttacagtatttttattcgttgaaataatgctcttatgggagttttttcgctacatgaatctcactacatgaaaaggggcaaaaattagtggtaatgaaaacaaatttagatcaaaattcaatagcaaatgagcatcaaagtcaaactaaaagaattgaacgaagaagaaaaacaattcaagcaatttataacttaacaaattacaaaagctatcatgcatttaaaaaagctaatgctaggttaaacttatttttcggtgtattagctataggtggtttaatctcatgctttatagcgggacagtttggtgcaatttttagaggattaattttggctttgctaatagtgtatttgctgagctattcatggataatgacaaaatcaagacagcttagaaaagattcaacgaccgctttacaagaaatggaatttgaaagtggagcatatgttagttcatggcagctttatgatggaatctataatgaagataattggatctcactggaaattgcatttggtagggaggatagttatgttgcagatattacaaaactagttcgaggaaaaggaaagatttatccattgccggaagatgatattcaaaacctaaagacaatgatttttaatttaagtcagattcaagatcaaaattggtttgtgtatggtactcttactgatcaaatggcaaaagacttaattgaaaagggctttgatttacaaattatggagaaaaagtatcgaactaaacctagtcgtttagattatgctgtagcaactggtgattggaaaaaggccttttttaagtatcctaaggccttttcagcttatgcgatttttgttgatgaaaagaaatatcgaaagcaacttaaagctaagcaattaaagaagaaatgattagttttcgttttagctaagttttacttggtattataaaaacagttaaaagaaatgaggacttaaaatgattaggattacgactaaaagcaatgaagaatacttttcatcagattttactagtttagatgatgcgcttgggtatattagtaatttaaaacctagtgattccttttatgtagatgattattttgataaaagagctaaaattaaaaaatcagaaattaagacaataggattacctgcagaagaggaagttgtaaatggcggcgatattgataggaagcttaaagcttggccaactgttgatacaattgatgttaatccaaatttaatacatataaatgctctacgaaaaagtaataaaattataaatttatcagattatcagaatcatatgacattaaaatagtgggatttagttgaattcactaatttttattagtagtgataaactagatatgtagtgaatttgattattcattttgatttaaatgatcttgtattgttaagatcgttttggtagttatggttattttgttagaccatttgtattgtttattatttattaaattgtttaatgagaatagttttttaggttacaggtatgtacttgtaacctttttattttagaaagagtgttaattatggacaaagattataaggtagttttagtcaatactaaggatcctgatggtgaaaaaattcttaatcaaagtaaggatgttgtacgccaagtgcctgatgaatattttaaatttcagagtgtgggtcaacatgacttctgtgatgtatctttgagtggtcaattggcagatgatcctgctttttacttcaagaaaagagatcgcaattctagaagacatggtgataatttcactgataattctgtttttgtgaatttaaatataatttgtactttaagaacgtatcatgataaatacggtcaactaaaagaagttacatcaaacgtatcagctcggtcatttagagaatatgataaaagagctttagctttgtatcataaaggagatcgtgttacagttcagggctctcttagaacgtattcagatcgtgatgcttctaaatcatggttctatattgagattaattcttttactgttaatccgtataagacgatgagcaaaatggcttctgatgctttcgatgcaaaggaacccgttagaaggactaatgatattttgtccgattacagaatcagtaatgaagagaagaaatctcaattagaatggataaatttacaaaaagatagaaagttaaaggaacaggaagagcaaattgcctgtttacggaagactttatcagatcagcaaaaagaaaaaattttgaaggctgatcagcaaacagattctttgcaagttgaacctatgataaaagattcagttactgaaaatgatgatagccagtctcctagaattaattatcaaaatacccctgaagttccatttgaaaaaattgagccaacagatgatgctgctaatctaaatagcttagatacattagctgataaccaagctacggaaggtaaaaatggtggtaaagatagtccgtcaacgatgaactcaactcaagaaaaaaaagttaatcaattcgctacaggagctaagataaataataatcaacaggattactccaaatcctatattgagaataaaccagttactactgatgaactcgataaggctttgaattctgttttttggtaagttggttaaaaaacggaaaagtcactacatagttagtggcttttttttaccatttatttgttttgagtatataaaatattgatattagaaaattagcttacttttgcaataactcaactaaagtcggtctcaaattactattaatttaaaaagagaggccatgattaatgataagtggacatcattttagtaaccaagaaattggtgatttagaagcaaaatatttaaatgaattttatattgcttcaacaccagatccaattcttgcagatgcaagtgaatactatgctattttgtttcaaacttttttgcataaaaaccaagataaagtttttgatcaaatgaatgaagaacagaaaaaacggatttataaaagtcaagacactaaatttcgaaatgctatgcagtattctttcaataaagggcatcaaacggcttttgccttattgttaatggatagtaagggatctacagaatttgatagcagcttctttaaaaatcctaattctaaattagcttttatctacaatctagatcgaatgatttcacctaaagttacagagcaaaatttaaggcgggataagaatgaaattttgataagagagactagaagacattttgaaaacggctatgacgagatcatgtacttagctaagctcttttataagaaaggtgctgaagttgcctttgaacaaatacggcaaaatattgtcaaaatgaattacttaattaaaggaagatcagcacttttaaatgtaccgtataatcaagattttgaggttacaccggcttttacagctacctttgcaatagaaagtcctaattatgaagagtgggacttacattgggatgcaacatatggttataaaatcgctaaaaaactagttgggaaatttatgattcatcaactgtcaattaaggaaataaaagcattttcctctgtaggcgccattacttataaaatgttagagaattactttgcaagtgccaacttaggtgaaaacgatattgtgtatttaggagaaattaatttcgcactaatttctcctaatgagaatatgcgtacaattcaatctcctgaattttcggcgattaggactagcttagcgttgaccatacaaaggcacttaaatattggtagtcaaaatatcttgatagctgactgataatgaaaagacgatatagaaaggagatgtgagctgtgtccaagatggtacttttgggtatggatgaggcgaccgcaagtaaatttggaccatatttggagagtaattctaatgtgcttaaagttatgacgcaatgtattcctatttttcataacttaaaacaagcgctttatcaatactcccctcaaatagtctatttatctttgtctcgtatgagatacgatcatattaagtccaaagatattgagaatgagattcttaatggtatttataaaataaaaagtgatcctcagttaagtaatattagaattgcaattcaaactaatgaaaggactaacccaacatttcttcgaaagttagcaatgctacgtatttctgatattttcttatctcaagggaaatcaggtcaaatggatagagtagcacctcaactttcacacccacctaatattaaaaatattagtgagtttttatcagaggatgctccaactctaaaagttaccactgatgatactaatgtagttaacaatgaaagacatgatcaacagagagttaatcaattggagcatttacttacactggctaatgctcaaatttcagttttgaagaagaaaaatgatttaactgctgtaccaagatcagattatgatgagttactacaacaagtaaaaatgcttatgaattctaaattaactgatgctaaatctaaacgtctttttgcagaagttttgaattcaaaagttgctgatggtaaaaaaatatcaaaactatctaaaattgttgatgcacagaatgatcaaattcttaatttgaataatcaagttagtcaaatggagaaaaaaagatcatcaacttcagaaaatattgtacagcctgaaaaggtaattgaggctccaccagaggaagaaattgctgacgaggatatacaagttaacaggttacctaaacctagaaatattgcaaaagatcgtggacatccaaaaataaataaaaatatgccttcgtttaattttggaaaatttgtaaggattgttacgtctgtcctattgattttaattttgctttttgctgggggaatgttctggacgcatttaaatactcaatctgcaagtagctctaaccaatccagttcacctagttttggttcattgctaaagaaaggaaagtatgttaaagctgctaagctctatacagagcgtggagttgaagcagaaaatgcaatgttatccgatcctaatataaagaaaaagggtgatattgctaatggaattgcagaatataatgactccgatgcaattaaatttgatactagttacttttctcaagattttgaaagtgcagcaagcatctacaatgaatctactgatacaaacttaacacatttaataaaagcgagacggatcatggtagcttacgctttgatgaaatccggtcagattgctaaagcgaaatcaatagcagagccattacataacgatcaattgaatgagcgaattaaggtttatggtcaattctatcatgctaatcaaattttagaggcaaaaattaagcatgggcatcttgatagtgaagaaataacaaaggctaaaaaacaaattaattctaatcaaagtgcaatggataaactgtaaaggagttttgaa

SEQ ID NO: 11 - DNA, 17636 bp, Lactobacillus crispatus
  source 1..17636: mol_type = other DNA
atgacaaaatcaacaaatttcaattactatgaagccgataacgtatatggagccttatttttccagtttcctaaggtattaatgtatggcgagcaatataaacatttaagcagtgatgctaaattggcttatatggtactgaaagaccggctcgagtattctttacgcaacaactgggttgatgagcaagggcacgtctactttatttttaccgttaaagaattacaagatttatttaactgcgctactgaaaaagccgttaaaatcaaaaaagaattgcaaacagccaatctattaaaacaaattcaaatgggatttaatcctaaaactaaaaagaatgaaccaaatcgtctatacctttctaaactcgatgtgaaagctactgatgtctatttaaggggcgaatatgggcaaaaaaagccggaatcccttactacgagcggaatttcgaaaatcgaaagtccgcatgacttcgttgaatcccttgctacgagcggaatttcgaaaatcgaaagtccgcatgacttcgttgacgacaaccctcaaacccttgctacgagcggaatttcgaaaatcgaaagcaatctatataaagactataaaaataatatagatactaatagatacgatatagatactcaaaagttggacttttccacaactaatttttcaccagctgaaattgaagcccaaaatcgagatctagtaaaacatgctgatgagttcttaactgacgaagataatgggttgccggtcttcttagaaccagaagcagttcaactacttagcttttggtgccgtaccccacaacaaatgcggcgctttattggcattatcttaaacgccaaatatgctgttgaaaaagagcataaggatttaggcgtatggattctattagacgatcctgatttaaaaaaaatgatgaccaaaacattaagacgctattttaatgctctaagaagcgacgagaagcatatcaagaatgttgagaactacctgtacggcaccatgcaaaacctatttggtgtttggtggaaccgacaagcagctagagaatatgcggccaaacaccccgaagaacagaatcttgatggcgagcgcgcttgggactaaaacgccatataagcccatttaagccacttcaagtgttacgcatatattttactaaagccactttaaaatcgcttagaagtaaaaacagataccttgagtgggcgaattggcgatagctaaactagaaaaatgggataggcgctttttaaatgaccaaaccaagcaaagaagttgaaaaaaattgagcaattgttggctgacccatgggcagtcgatattcaagacatttgggagcaagcagcccaaaatcgagatcctgataaatgcaagctgtttgacgcgttatacacttacctcttagataaacgccaagaacaaatcatcaatgaaaagcactttttgatttaacatagacagttcaaataatcaatgattgaaataaaaaggaggcacaaaatatggctaagacacgaacatatatggacaagtatagattcacaactgcggaaaaccaacggtttgcccgagcaaattttaccaagttagtgcatactaatgctcgctttgaaggcgttaataccacattgccacaaacacaaactattatggacggtatgagcgtagcaggagtacctgttgaagatgttttgacgattgttaatttaaagcgtgggtggcaatatatcactactcaaaattcccctttaacgttaaccatggaaaaacaaatcaacaaaattgtggcagcagaagacgccttagtaccaggagaattacggcaagggaaagggggagttaatttaggtagtgaagacttttttgagccgcctttaattaacgaaaaacaggaacaatcctttttacaaaaaatcttgactgatccacgaacgacgattactgataaagcattgactgtcatgtatcataatatgcgtcaacaaatcttttgggacggaaacaaaaggacggcaactttaagtgccaataaaattatgattgacggtggcgctggtttaattaatatcccattagataagtgggatcaatggaacgaactaattgccaattattatcggactaatgacatgactgaagttaaaaagtggacatatgataatggtatccaaggattacaaattcgagcaaacaaaaaattaagtgttaatcacaagtagtaaattatgtatttaatatatctaaatatgcctattaatgatataattgaccgcaaagaaagcaggtctatttttatgtcaagaatttataaagttggcgaagctgctaagcttctcggtgtatctcgctctaccatgcaaagatgggatcgagaaaaaagactagttgctcagcgcaatgttgccaatcgcagatactatacgcaagagcggctggatgcttttaggggcattaagcctcaccgcaagacagttgcttatgcccgtgtttcttctgtaggtcagaaagaaaatcttaggcatcagatggctttcatcattgaatatgccaatgctagaggcatcattattgatgaacatgtagaagatattggatcagggcttaattataaccgcaaaaaatggaataaattattggatgaagtagaagcaggaaaaatagaacgaatctttgttacctataaagatcgttttgcccgctttggctttgattggtttgaacatttttgtgctaagcacgatactaaaattattgttttaaacaaccctgaaacctctccagatgaggaaatggttgaagacttaatttcagtaattcatgtgttttcatgtcggctttatgggttgagacggtacggcaggaagattaggcgggatttaaagaaggaaggtgaaaagagtgatcatcaaaaccagaacatatcgattaaaacccaatcaaaggatgaagaaggttcttgattcgctttgtgattacagacgcttcagctggaatctcggtttagaaacctggcaaaatatgcatgaagccagacaattggctttaacccagcatcttaaagcagaacttaaaaagcctagaaaaaaacaaaagcttacaaacgctgaaagagaaattctcgcaaacaatcctgtcccttcctggcgcagaattcgtgatgagctgactgaaaacaagcaatactggcagacaaagcttccagctcatgtctttaatttggcgatccaagacttaggcaatgcttggcagaatttttttgataaagcgcagccaggctggggaaagccaaaattcaagtctaaaaaagcacctaggcagggatttaaaatggatcaggccaaaattaaggatggctgcttatttttagaaaagcctagggctgtcaaagaaacatggaacggctttaaattaagctctgctccattgtcggatgatttcggaacaatcagcttttacaaagaaaaaaacagatactatgcatccattccttttaaaatatctgatccagaagacaagcctaagacaggcagatatacaggcgtggatatcaatgttggacatttcaattacagagacggtcaatgcatagtaatgcccaaatcgttagcagcagtctattgcaaaatcaagcattatcaaagacagctgtctaaaaagcgtgtcgtcaatggtaaaatcaaaggaatgcaaagcaagcgctacatgaaagcgagaaacaagcttcaagcagcttacgctcgtgctaaaaatattcaaaatgatttgatgcagaaatttaccacaaagctggttagcgaatatgattctattgtgattgaagacctaagcgttaaaggaatgcttatgagtcatgttgcctccaaaggaatgcacaggtcaatgtttggcagatttagacagatattgacttataaatgcgaatggtatggcaagaaattgatcgtagccaataaactgtacccttcaactcaaaggtgcgcagcctgcggattagtgaaaaaaggcgatgaaaaaatcactttaagaggcaataagaagcatggcaccaagcataatgaatttgtttgttataatccgaactgccgtaactataataaaaaagttgaccgtgacgaaaacgccatgctcaacttaataattctggtaaaacatccagaattaaataaagccttataaaaagaatgcgggcgaagctacgtccgaaaaagaagtcaaaagagtcggtcaatgcgattactcccaagttggaatatcggaaaactgatgaagacgttgataagaaaagcataggcatgttaagccataatgactacaaataaatacaatgtagttgtttgcatatgtttttcatagctgctaatgaattgaaccagatgtacaagcaactaaaaaaacggataaattagaacttaaattagttcctgaattgtcaatttaagtgcaacagttaggttatgaagagatatattgcttgaagagttcttctgctgtgtgatattggaggattcggcgatgtttgtggttaatggcattagttgcctgttgaacatatgcagctgtcttatcgttcatgcttttgcctttagggaagaattgacgcagaagaccgttgcagttttcatttgtgcctctttcccaaggtgaatatggatgagcgaagtagatctgacagtttttaattttagtcatatctgcaaactcagaaccattatcaaaagtaatagtcttgaaccaatctggatgctggtctatttctttttgaagcagtctttgacaagtacttgctcgataatctggtattttgatgacaatttcaaaacgagtagttctttctgtcagagtcatcaaagcaggctgatttttacgtctaacgcctttaacccaatctccttcccagtgaagaggagttgctctgtcttcaacttctttaggacgctgctcaattgaattgccaagattctttttatgcaaagcatgcccaccatgactatgatgccgtttgtttctgcgtcttttaagcttcattggcagatcaatattgcttatatctagcaaaccgcgatcaatatagcgataaacggtaggcgtgctggggcaaggatagcctggcatcgtctgcttgaactcacccacaaactcatcaatgctggtagcatcaaatttagttttaaaccgcttagacagcattttcagaaaaacagcataatgctttaactgatcacgcttatagcagttcttgcgtcgcttatcatgatagatctgcgcagtatcggcatagtaatgctcatagagcagatagttatgatctctttgcaggacgctgccacgtctgatttcacggctaattgtcgatttgtgacagccaacttctcgagcaatagcggaacaggaggttatgcctaaatcaagcagagcttgtatttgtcctcgttgtacactatttaattgatgataatgtctagagatgctagaatttgaattggtcatgaagattcaccttccttgatttttcgtcacttcaagtttaggtcttcatggcctttttgtttaacacttagcgttgcacttcaattttaaatccgggacttaccatttctgttagaattgcaacttgttctttggtaaatcgctgttgttttctaatatcacttaaatcttttgtccacttagaatttttttcattttcttctgctaacttcataagatgatgaattacttcagcattattttttaaatcgtgttcctctttataatcttgaatccaatctaaatctgtatcagaaattgtcgctctaaaagttgtcttaatcattttttctggtcctcttaatcagcgtaagtttcttgtctttttttcaaagcattatcaatcttttgattaattttttgtaactcttccagttctttttctttttgaacacctaacatggcattgaagaataagaacttataaagttgaccattattatcaaagcaatgttcttttctaatctgcctaatttcttcccattgcttatcgttgagtcgaaattgcaaaaagtgctgtcgtcccatttcttgccctctttctaaatttaatcatcttcttttgccgtgtcttctgacaaactatctaacaaatttaatgctcgttcggtgtcattaacatctccactaatgaaatactttgcaagaacattcagccctaataaattttcctgcagaagtttattctgcttctgaatcaataaactagtttgcgaatcttcattttgattttgaaaattaattggaatttgttcaatttgttctctcaaaaattgatttctggaaattttcttacttgaattttgatttaattgattaacaatccgatcaattctagccaagttttgttcgctgattccacggattaaaacttttaccataatttttctttcctctgatttctagtttctagttttccttctagtttctactctgaaatttgactaaaatctgcttcttttagttatctctagtaaagagcataagggaaatctgaccccacgccttttatcaaggtgtgctgggcttggttgtaccaagcgatttcgcatttttagaagtgatatcacttctgattaatttgacgtctatatacttctaaattgttcgtcttttacctgacattacgtcttgatacgtaatgtttttttgtaatatccgaacaggacgtattcttacgtagctcattacgtccaagacgtaacattttttgctctatttttgagtctagttatcaaaatttctattttttaactctaaaatttcttcaacattttcaaccaaaattcctaaagtcgacgcaatttctcttgtgcttttgccaatttcccgatattttttaactcgaaaaattaactcttgagaatattctacaggttccttatcacgctctatctctttaacttcaacatttctagcatgatacctctgcatcattttttgcaaagttccttcaagaatatcaaactgatttacaaattctttcgctaaaattttagaaaccctatttgactttttagcttcataaatcatttttctatatctctgcttagaagcccgagaagctttactatagaattcaggattatgaaccaacgcataaatcatcatttgcctatttaaattttcctcatggtcccaatctggcaaataaaagttttccagcatttctctaacttcctgaacataattttcaatttttgaaccacgcaactgcatttctaatcgccaaagtgaatcaacatttacaattcgtccatgcctttgttcttgttcaatttttttattatacaaacgaatttgtctctcacttgaacgcgcgccgaaatataccgtttgcaattccccattcttaccatagaaaaactttttagtcattccccagcgccatacctgataatactgaatctcagaatcattataaatatcaaaagctacatcacaacgtgaataatgcttattttgaatttttgcaataatttctctaagtagccattgaccagctggagtattcatcgaatgattgggattaaagtcaattctaatcttatctttttgaaacctaggaacttcaaaatatgcaacttgcccaggcgattacagacattaccggcagaattattcatttagacagctgccaggcataccggcatgacatgcggctgctgcgtgattagctgatatattataatttttccaattattgtaaatatcaattttatcttgtttggataatttagacataaataaaaaccccgaaattcttgtccgaatttcggggttcatatcaataaacactttagctgcttttctattattaaactaaatcatacatttctggcattctgcaccattttgaattaaacattcgtctgcagtcaagttctcactaccagctaaaactttttctcttattctaacataataaattgagttgcagcgctttttaaaggcataaatataagccttatttaaatctcttgttgttgcattatcttcaacaaataaagttaacgaaattgattgatcaacatacttttgtgcagcagctgtaatatcaataatagcattaggtcctacttcatatgcacccttttcgtaatactcataattgtctttattaatcttataagctggtacataaattcgacccaaatcagcctctttgcgtgtttcaacaggagctactactggctgcaaacttggtgtacatgaagataaataactaattgatccagtaggtgcaactgctaacaagttagcattagctatacctgtctttttaattttagtaatcaattcttcccaatcttctttagttggaataactaatttatatttagctacaatttctttaatcttgtctgttttcggtgagacttcctcatcaataaattttttgaaataatcaccactagcatatgatgaatctttgaatcctttaaaagcaccatacttttcagctaatttatttgattctttaaatgcatggtatgcaattgtataaaagaaaattcctgtaaattcaactgcttctggtgaatcataataaatatgattagttgctaaaaagccatgtaaattcattgctcctagaccgattgctcgattagctttatttcccttttcaattgaaggagcacaatctaaatctgaagacctggcaacacgattaagcgcttgaacactatcagaaaccaaaccacctaacttgtcagcgctattcattgctgctgcaatattaagtgatcctaaattacaacaaacatcgtagcccgtcttattaaaacttaagtcttcattataggtacttggcgtattaacctgagcaatttctgaacataaattagacatcacgatccgccccaatttcttttgtgggtttcttcgattgacagtatcttcatacataatatagggataccctgattcaaattgaacttcagcaatagtttggaagaattttctagcactgataaatgtctttttaatacatggattattaaggagattttggtattctttagtaattgaaatatctgacattggtttaccatattcacgtttaatatcatatggtgaaaacaaagccatctttttattttctttggctagttcaaaagtaatatctggaatcactacgccaagtgataaagatttaattcttaccttttcgtcagcgttttctcgtttagtatctaaaaattgcagaatctggggatgatgggcacttaaataaactgcaccggcaccttgtctttgccctaattgattggcataagaaaatgaatcttctagtaatttcattacaggaattatcccactagataaattcttcatttttttaataggtgcacctaattcacgcaaattagttaagcatagagcaacaccaccaccacgtttagataattgcagacttgtgcttattgctcgtgaaattgattccatattgtcttcaactctgagcaaataacatgaaacatattcaccgcgtctctttttacctgcattcaagaaagtcggagttgctggctggaaacgattactaataatatctttaactaaattcaaggccagttcttcattgccatcagctaaaaataaagcattcataacagcccgatcttcaaaacgttctaaaaattgtttattatcgtttgtttttaaggcatatgctttatagaatttagctgcacccataaagttcaaaaagctaaaattttgcgcataagctaatttgaaaatttctttaataaatttagctgtatataaatctagaacttttttatcatagtaattattatcaactaaataagctaatttttcttctaaagaagcaaactttttcattcttggttcaatatgattttcaagatattgcttagtagcttccttgtcagctttaaaattataatttcctttttcatctttaaatttagcaagtgcatttaaagaaatatatgaatcattattaagatgatcagtcattgtcctcacctgcatcagcaattattttattaacattatttacatcttcagttgttcccagtaactcaaatttatatagataaggaacatgtaatttcttagaaattacatcccctgccaaggcaaaagaattaccaaaattggtatttccactagcaataacaccaatacatttttgccgattagccaatttgttcaaaaagtggataacttgctcaggcacagcacctgtagtcccatggccaccagaataagttggcgtaattaaaatatattcttcagaaactgaaatttctttactgagtttaataggaatcctaatagaattacaatctaacttttctacaaagcgtgctgtattatttgaagtggaagaataatagacaactaatggctttttagaaatcccagtcatcatctttagtctcctctcctgttcccattacatatgaagaaccattaccagaaaagaaatcatggttttcatcagcttgagctgataattgagcgaatacttctggggaaatataagtttcttctgcggtaaaaggagtatcatagcctaaattttgtaaaaatttacctgcattatacaaactgaaatgaattgcatcatcaaccaaatcaaaatcatcataaagctcgtgcaaatatttcttttccaaatcaattagtttatctaagaaatcaaaaacgaattttttcatttctgcttgtttagctggagctaatttctttacggccaattgatatttgtaaccactataataattgtgaataaccttatctcttaagatcaatctaataatatcagcagtattaggcaatttacctcttgcagctaaataaaatggtaaataaaaaccaccataaagcaggaaccctggcataattgctgcggcaacctttgatttaagcggatcattgcctgtataatacggaattaccgctttagctcttgcttgtaaagcatcattattaactacccattcatgcgcttcttcaatttgttcactagtacataaagtagaaaaaatagttccatatgatcttgcatggacagcaaccataaaagcaaaatttgcatagatagcttgctctatatcagtttgtgaatttttaatttgggctacatcacccacacttgattgagttgtatctaataaagtcaatccagtgaaagtgcgagttataagctgttgccagtcatcagataattgattccaagaacttatatcattcgaaactgggattttttcaggtaaccaaaagttttgagtaactctgttccaaacctcaagatccttatcatctttaatgtcattccagttaatagctcgcatatttttgccgttgttattgtaagcaaattcaactggtgactgtgaatgatcataataactcatatttgtatttgctcctatcattatatattattttacgcgtggtgctagttaaatctttctagacaataagccaaattataagctaaaattgcaatttccaaccggctttgaaagcctatcagactacgtgctcgattgttctcggcattgtaataggtcagaagcgaaaagtcgctttcaattgttctgcgaatagccatcaattgatgatcattgtgctttttagctcctgtcatatttttacgatatggtgtccaaagttcataacccatttgttttagctgttgatgcagttctttgcctaaatagccttcgtcgccaagaagatagtaattagatggatgggcattttccagcagttcaactgtctccttggcatcatgaactgatgcttttgttacgacataatcaagaatgtaaccgtcatcgctaacaatggcatgaactttgaaaccatagaagtaaattttcttggtggccttataaccaatgttggcataaccgcgaaaaattttagcacgatagttgcgaattggttggcaaacaggtaccggaaagctgtcaatgatcaagaaatgtccattcaggtcaacctttttattcatttcttgccgtatctgataaatcaattgcaatagctgacgtgaacgccgattaaaacgtgagtgtgataaacaattgaaacattcacagaatcttctttgtgattcaattcctgtcttagcttgccagataagtaaagccaaaatcagactgtccgtagttttaatttgatcaatatttcgccgatgagtaaactcagccggtgcatacaaacgataccagtgccgacaaattatcactaaatctttaaaactaacttgtaaatggtggctaaaacgcttaagcttaaggcagttcaatcagatcagactcttttctattattactatttacaagtcgagtctaacaagattggacttttttattaactaaaacgatttaactagcaccacgcgtattattttatataatatttgtgtgaacataatatagcatcttctgctcaataatacaacatgtggatttttggctatttataatcaatatattgtggctaagccgttttgataatacaaaattattttcaaatttattttatcttccaaaaataatgtaggtgttgttttttgcttttttgacaaaaaaatctccctgaattgtcaaattaagtgcaacagttaggctatgaagagatatactgcttgaagagttcttctgctgatagcgctgaaatttcaaatagaattaataccgataacgatcaggatcaggatcagcaaggtgataatgcggaaacaaattttgaatattccgatgatcgtgatggagatgaccaataaataattaaaaaaaggagtagacaaaatagcattaagtcagaaattagctttgaataatgattttcaaaacaaaaaagccctgctattatgcagagccaccgcgcgttcgcaagttatcgtcttgctgcgcatgcatccatgatcattggacgcgacaattttcctacatgtattataacatgctaaaataaaaatgcatgtcattcatgcacattctagggttggctcaatcaaccaccctataggaggtgagagacgttggacgacatgacaattttcctaatttgcgttctgctacatgagctccatttagttcttcgggaactaaataatctacttgataagtagtcatcattagtagacgcgaccagagtcatcggcagttgtatagtcggtgacttttttattttgcattctttaattctctaaagcgtcgataaattggtgttttggagatccctaatttcttgctgatttcagaatagctcctgtatgcaacctccaggcaaaatcaatttgttctggagtgtactttcgaagcataccatcatggaggttggtattattagctttcgctcatgccttgttttcccaagatgaaaaagtgcgacagatcaacgcttttttatttttttggtcaaattttagaaatatgctaaataaaaaaagcggtcaaacgaccgcccacgttttgcatgcctcgttcatgtcgacagcataacactaatcctttaatcattataacatgataaaatagttatggcatgcttttgtgcccctacactgctgtaaaaggctagaaaggagctgtatcatgtcagatgttgtaacactaatcctaacaatcgcacttttgaatgaattacatttagtccttcacgaactaaaccagctattaaagcactagtgcaaaaagtcgtccttcggggcggcttttttgtctcttaactctctaaaacgccggtagatagttgcttttgacatacctaatttccgactgatttcagaatagctcatgtggtcttgagtatggagcttccacgcaaaatcaatttgttctgaggtgtactttcgaggcataccatcatggaagttaggattattggcttttgcccatgccttgccttcctgggttcggttcacgataagatcacgttcaaattctgcaaatgcactgaatacagtgaagattagacggccacttggtgaattatcaatcgtaccaatatttaagacgcgtagaatgattccctcagcatttaattgtttaacaatgttcaatgcgtcctgagtattacgtgctagtcgatctaatttggtgacaattagggtatcaccactaccaatttgagccatcaatttatcgaattctggtcgatttgctgtggtgcctgtgtatttatccttaaagattttggtcgctcctgcctgttttaggtcttcaacttgagttgcatagtcctgctgagtagttgaaacacgagcatagccataaatggtatttgtcatatatttcctttcaattatgaatacaagttatgaatatggcttatgccctatcttagaagattctacttttgtattcaagactttcaacttttgattacaaaacaaaaagcagtttctaaaaagaaactgcttaagtattattattttcaataattaccatttaatgttagaaatagaagatcaaaagtagagaatgaaaatgtaaaagtaggagtagagaataaaaatgagaaaaaagggctggctctttctaacagccagtcagagtactcaaatctgagacaaaatgtaaaaattagcatagatcgattaacaattgttggagatttttcgacagagctttttaaaaaattagttcgtaaatggctgactttttcttttattagatcttcgggagctggttttgaggtattagattattcaaattgcaggtttgatgatttcggtaatccacatgaggaaattccgcctgggcttttaaaacgtgctgttttttcttgccggaataataagctgcttgtctttttttgggcgttgaatctttacttcagtggcatcgattaagacaacatcgtctggcttgatttcttgcttgccaatgttaaagccatgcttagccaaagtctcttcggcccagtggcttcttctgatcaggttgctgtcatgcacaccgtaatcggcagctatttgttcataagtacggtattccttgaggtactgcaaagtagccagaagcaggtcttcaattgccagcttgagctttctgccgcctcgggcatgcttgacttgatattcggcttttaatactttgaccatttcgtcaaagacaggcttggcaacgccgatcagacgcttgaatctggtattgtttaaatttttagctgtttcgtatttcataatttaagattatagcagatgtttcgcagtaactctattaactaaagaaacaaataatgaaaggcatggttggctttggaaaataacgcattagctaataacgtcaaaatacgctgaactgagtttgtcgaaataccggtgagactggcgatagtcttagccgggagtgatttactggctagcttcagcacatgagtcgctagtccgtgaccgatggcgtggttggttgataccactggagtggtggccgtacaagtgctatggcagttactacaacgccagcgttgcttgtttagctctagaattacgggccggtccatggatcctgcaatgtggacatgagtgagcttgtgtccgttagggtgcaacatattgtatccacagctgggacagcgcctgagtgtgtaggtaagctctgcctggatgaccaaatactttttgcgacccgagccccgaccatgaaattcctcacgagtaccgaacacccgaatgtttgtgtctgtaactcccagtaatttaagtgtattatctagttgagacatctattcctacccccgcttatcttgagtttcgtcgcttaaagcatagcactagggaggcttagatgcctttttttgttatcaaaaagggcctagtacttttggaatggaaatactttccaacaccaaaaattctagacccctaaatttgcgatctaccacgtatgtttaaatcaaatttattttaaatataccttgtacagtgaagtttattgattgtgtgatttatgataagagattaatcttttatcataaatcacacaatcagtaatacataagttaagctcaatcttatttacgtttggcaaggccttcacgaataattttttctaagacatcaacaatttttttgtcattctcaaaagcgatgcgtttaacttctttatatgtgctcatgcgaagttgaacggttttagttctttctgtttcgaattggtatggactttttagatttttaagttgttcagatgcctttttactaactttgtttaaaaaatcttctgccatgataaattactcctctaactgttgaattctaagtagttgttcattaagaaccatttggtacatttggattgctcttttatcccaatggtctttattccgtattccttcattagcaaacgttttaacccgttcttgagttctaattgagtttgaaaagaccccttcgccaaaaaagtcttttgcttgtgcagaaatttcagtatcaacttttgcacgtggcttcattaagtacaatatgacaccaactaactgaaaacttccattgtattgttcacgtagttcacctaaatgcgtagctgtttttaaagaacttgtatatgactgcttttgagtttgtaagacaattgagatgaaatctgaagccatgattgcgttattagtaaagacatttattgttggtggtacgtcaataaaaatataatcgtaattttgttttaattttgaaagcatttgtggtaatagaatattacgtttaacccgactaactttttctacagcaccaatccataaagacaatgtccaatctgtaggaatcatatcaatttggtttgtaacagacacaatagatttagacaaattccctccaagaaggccctcatataatgaaagttccggctttaaatcggctttataagtctccttcataatttcagttgcatttccctggggatcgaaatctatcagtagtacttttttcccctcttgacccaataaataggtttccattacagtcaaggtggtcttaccaacgccacctttaaagttgaagtttaatagtgttttcccattcatagtagcacctacctttacataaacattttaccatgatttatgattaatcgcaaattttatatgatttatgattaatcataaatcatatccatgaaaatatttacttaacctttgcagaatgatatgctttgttcataaacaaaaaatcccaatacactcgggattgggatttttgcagtattgacaagtagctatcttgcagctacctagtccaagcaattttcaccgccgagttaaaattgcttgaacaaattgtaatcttgtttacgtgctaattataccgcaagcaaaccttaaagggcaagcaaaggtaaactaattaaaacgaagacaagaccaatggactaagtagcttctaataactacttagtccatttttagttcttaaaaattaaaaaagttgccgactgggcaacccagaatagacacatgctggtgaaactacaaagccgatcacgaccaatatccgctttgtaattctattaaagcatatcagatttgtattttaaagcaagtcagatgttttagcaactctcttttgagacagcgtgtgtcagtcaagaaagggagtttttatt
